United States Patent Application Publication US 2026/0130347 A1 - sequence listing, part 3

SEQ ID NO: 129 - DNA, 198345 bp, Hippotragus equinus
  source 1..198345: mol_type = genomic DNA
atgaatgttcttcatgtagatgactaagcatcagttgtcaattatgcttgtgactgctagaaacccaagcagctctgcaggtcttcagctaaaatgaaccagcctcgatttcagcctcattttacctgctttccaatgtctcagtattagaggccattattgcagacattcttagagttcttttttttctccagaaagtattgtatttgtatgcatcacttttagcccttttcttttcacgtagttaaagtcatttaaaaaattctttctttatacgcttattgtgggaggtattggcagctgttaagatgattagttttttccccttcagatatggttctgacattcttttttaccttgataaagtttgacattagttacactggggttgtggatgctgccagaaaaagtcgtcagtgaactgcaagggtccataaaaggtgcttgttaatattcttaatcatcttcagttcagtcttttcctgaatgcctgaagtttctcaaaatccagtgctcgccaaatttccaattggtttggcctgtgcgaggagttggtatgattgcaccgtgcgtagagactctcttatttctaggttaagttccatcagtttgtagttggcttctgacatgtccaggtcagagcctatgactgcaaagcttcccgtctggcccagcgtctggtggtggaaatagatgtgtaacagcgtctggacaggggcgtcttcacagctgccaaagatgtcattgggccagagagatctgaaagcacacagtatttgtaagtcctgagagtcacagcaatcattccagattaagtacttttaggttaatacttaacaaaaaaagtaatttccttatgaatcactgaggatctgttttaacattttaacaaatactactgaaagtagcacagagaatgaacaaagtctaaaattggtgtcattgcattgataagtgtacaaaataaggtcatgttttcctttcacaaagattgagacatcaagttgaaaacccaaactccatcataaatttccagttaggtataaaggcatctcctataaatcccttcacattttacctgaaagctttgacttgtgctacagctgatataaattccttatttttcaaagtttcaattaaagaatgaatggcagtttctatagtagtttgtgcagctttggaaatgtcaatttcttcgttttctgaggcagactcggcttctttgaggatactttccaactgggcaagttcctctgacatgttgaagacctaaaagaaataaatataccttaaaaggatcaaatttgtacattcagtaacaatactgagtacttagctgtgaaattacatctgatgatggtaatattttctcttcagagattcagttgttaaacttaggacagttcatatttcaaattctctattcagctggaataatttcagctgccaaagaatagtctttagatactcttgataaaacaacaggttatcttaagtgtaataaatgttattaatacattgtaataagtaaaacaataggttgtttatactggtctatattttatacatacttcatcttggatagtaaaaatacatttatattattattttgtaacaaaagccctgggattctgggaggatcatgaaaaaaaattaacagtaatgagatgtctttatattttaaagggctatttctccaaggtattttatataaaccggtatgtatgtttttttttttttttcaagtaaatttagaaaatgcagtgatttccttggtgatagttctggtaccagtggttagcaagagggaaagattctaaagcgcctacctttgaatctgttcatgctatgatttctaatactcgcagtgttcttgacgtgtttatttttgtgtgagttactagaactatagaaatactacatggacaagatgttagggggtttcataatacaattttgtctttattatattgatgtgcttcacttgatttttgattacagatgatctattgctgctattgcgaactttaaggtctcaaaccttttaagatcgttggatatctgcttttagatttactaactggtcctaaaatagcacatcatttcaaaaactgataatacttaactacggggggaaaaaagacccactagccactctccataagtgactttcgaccttagcactcctgcaagcaaataagtatcaatgtattttaattttgtacgatcagttactaatgcctagtacaagtgaatatttacctctgcttcattttttattgtgttgacttggttgataagtttacagtacgcttggaacagaagcagcagttgaaaatgcaatttgtataaccttcgacagagctccagttcctagaaataaataacaccatgttaaatttaggtgttatttttcatatttgacgagacaacaaagttccaataaaagtttataagtaaataattattttaaattgttctgagatttatctttctgcagtaagcaagttaatatggtatgaagttgacgaaacagatgaaagatgctctgaagactgggattaaaataaaaattttaagattattggttacatagttcatttttagtgtgatacattttcacattagacaaacagaattttttagcaggcaataaatagaatgctttaaaaaggattcactagaacttaaaacttcataatgaaaataatttacacattcatatactcttgctacattgagatatatatctcattgcatttatcaacaagtgcttgataaagcaaaaagtaaaactggataacctctcatctaaaaagtaagaataatttactttttaaattaattcctttttctaaaaaaaaaaattttataatctcactgaaacaagacaaattaaaaaatgcacttggattattaaaattaagaaatttaaaaggagattcattagagatgtgtaaaaaggcaactgctggttgtacatattaattataaaacctcattatctctgtaggactaaaacatttcatggattagggctatgcagaactaaagcacacactactcttaaagcagtccatgataaaacattgctaggtcacaaatggcaaatgaaaccagtttgtctgacatggataagtagtctataaattaagacaggtcacttactgctagaatttccatttgctaagcaagaaggtgatcgggtcacaaaaaatacaaaggaaaaaaaagaccaagaattagtgtaagaaatcattttaactagggtcacagatgtcccaggcaaactgaagaacatttaattacaccccaaagaaaaattcatgatgccatttccagaataaagttttttagacatttctataacaatccagggtgtttttcactctttgccaaataacagctaaattacatttaggctaaagtttatttcttatgcaaaagctacaaagaataaaatcaaactagtgggatgttgggaagttggctactgaaagtggtcatctatctgggtttttatagccttaaaaaaagctaaatgtaacaaatttctgttaggaaagtggaaaacttccaattacagtaagaaatgagttattcctacttctcagaagagaactggcatataattttatataataggtatctgcccatgagaatattacctctgacatggctccgctcgttctggctttcttaccctttgctgtctacttaaatcataagttaccataattagcactgaatcagaaggtaaaatattgagagcagttgtgtgttttaaattgcatttcaaatgaagtttactaaacctcagaaatttaacccaagtaggtttgaatcaaacatccagcttatggaatatttaaaaattattacatgaaaatatctacagcaacttagacctggtctcattaaaggagaataattacttctaattaaaacagcagtcatcatatgtaaatattgcttttgaaatattcagaagtcccttttgaaatctgcttttctaaatagtttcctctgaagcactgtttatataacatttattgctatcaatttagaagggatttgctaagcataggtgaactttagctctgaactacttaccataaattacgtggatggtcattctgtgaatgttagttgagcacaatccaatgtcaaacattagcatatctaaatttctgaggttttacttcatatagttttgcatggaaactatgaattttaagtatattttcatttctattaacataaaactgactccatacacatatatccatagcatccactttaggatgtaatggaagagatatcactgataaagtttataataatcacaattataggaaataaacataattaatttcttagttttgaattactagatcacacaaaatgttaacactgtacctttaaaaatattgctttttagtatgctgaaatttgcatatacacaatcctttcatttatctttaataaatatttattgagtgcttattaggcaaatggctatactggtatataggaacagacagtacataatgttgcataaaaagagacctctcctttcaaggagctgaatgtgaaaggagagctaagatataaatggaaggcttaaatgtaaagagttttcactttttactcagtagagaacctcaacctattttaattgacatagacttctgagatggaactccttgtcatcaggtagaagggatacaagaaatacttagtctaaccatctaatttatgtatgagaaaagcagtctgttccttgtttaagccatagtggcaaagacagaaccaaaggatctaattctagtctgagattaatcccttatcttgccctgtttctttctttacacagatgacataacaatttctttatgacagaccaggatttggagtcagcctttctaggtttgactcttaatcctatttacttactgattttagataaattagcttctttgagcctcaattttaatttgcatatatattttctccttatttaaaaatatttattgatagcttattatttatccttatctcataatggggataattatagcatctactagatgaaattgtatgggtagaaataatgaatatgaaatgctcagcacaatgcctggctaacagttaacatttaatgagcgtatactgctattttctcaatatttcagttttgtaaaacttcaaatttttattacagtactacagtaacttttatgacagtctgacattgtaaaagattagaattctgatgtcaaatgcagaggctattagttgattaacgcatgctccccctataaagttacacttctattaaaataattggtaggtcttaattttatcctcatttaatatatgtgttatatatgtgcactcttctctatattactatttttttcactgaattttactagcaaaacccataacttatccaaccagaatttcatctttggaaggactaacatgaatgtattactccagtttgctttcttgaccaatttatctgtagaatactaatgcagaatgaaaaaatttttaaagaggcagacgcaactaaaagtcaacctggactatccagatagtcatcgaatttatctattgaatgttattaagtttcagtcacaagctggtcgttcatttttattaaagtgaggttttcattactaagccaacattccactgaacctaacatttacaaagactgttctgataacaaaaatgaaaaatgttacaaatactctttatttttaggaatagcaaataagaacatttgagcatatacattattttacctgataagaaatatagcaaaactgagaataagaaacttacttgtgcatctgtgtttatcctatacatgtcgtctttggcaccaaatgtcctcttacaattgtctaaccactgaagaaataagtaacagtaaaattttaatacagtaattgcatagtacacaatgaaactggtactataacagcctgcacatacagaacaaaaatcttaaaaagtgaacttgaatttctaggattggttgtagacacaggctttgatctccacttgagcagaatcatttgtatgcaacaaacccaagcagaggatgctgtctacgtggcaacgtgtacacactggggacagtttattaatggaaacacaatcagctgtcttctattccagggacttgtggtgctccatttcagtaacgaatactcatttttgtagattttactggaaatcttcacagcctatgcttgacctgtgtctaatgtaagatggagaaatgaaaagtgggcttcccctcttgtcagtttaataaaggcaacttagaatcaaccaggtctgtttgtttttcagaagtgtaattctcagaagacgtgtgtcacttttaattagtgaaacagaaactcaaatccatttaaaatcttgtttttttttttcctttttggacagcaatgtatgaacaaatgtgttatctccaaagagatactggttgcagaagccaaatgtgattttccttatccaggggctagtcctaaagatggatattaatttaaggtaacttttccttggccagatataaagaacataatggtactgtggtttagtggggaaaaacactggactcacagaatttctaagctgaagtgaaagctaagagccttcaagctaagcacttaggttttgacagtttgatattaataatcaattcttttaccttcctggctcgctcttatgtgacagactaaacatgataaaattacaatataatattatcaaatatataatatgaattatatttgaaattatatgtatgaaactaggacatttttcattaggactctgagaaaaaccatgagctacattgtttattctttgaaaatatttcattattagacatttgaaattctcagttgtagcttaacggtctacatgcaaagaatgaaaattaggtgtctcggttgtttcaaaacagtctctttgaccttctgtcccttttatcccggcccctcagcctggctgggcccttaggctctgtgcttgacagcaggtcagaagaaaaacatgttaagcttctgtagtgagatacagctcctggcagccactgtcaaaagccagtcagcagatttctctctatcagtaaaattcagctgacatctgtcatggaatttgtacatgaatgtccgctcacaaaaaatgttagaatgcctatatggttcatcatcatcatcacaagtctagcccaatgtgtccagtatgctgatgaaaaaaattaattgcttattcttactaaatatatatttttacactgtatgcctatgatatggcatgggggggcactattcaacataattctggtttgtattctgttacaagacaagccccaaccctattgtgctgtggctgcacactggcctgaaaagtacaggtccacaccttcctgttcagtgtattcaaaacacaatagacagtctgggtacagaataacctccagttcacaggttaatcggtcttcctatcatggattttttttttttaaaactcagggctcaaatattaaaaattaactggagaggtttggcgtctgggtatgatggagtagcttatgtaaggcctgtcctcgaaggataactatggaacttgagtaagaactagttggaaaagaactaggaagtcaaaagaactgataatattagtaaatatcaaactgtcatatttagggacttaaataaaagtatcaagagaggcctactttgattccagcgttactataggggatttactcattcctgtccatgggctcagaagctgaagtagtggcctacagtttcactgggctgggaaagcagggctgtcacaggtagtgaggccctaaggatcaagatcctggagaagagggagctgcagaggaggcagcccagcagtccgtgtgcactctccccttggcgcgttcgttcctgtgtttatcatgtgcaggagaggctaagaaagccagcagtggcctctgggaggctgaaaaggtaaacagaggctttttggtcttatggtgctggggagacaaaaactgttcgcttccagcccagagagcgggtcctgatgaataccccaggctttcacttgtgattcttagaagcctcaaggaatatacaagaatgtattgatacaactaaaaaactattcagttcagtcgctcagtcgtgtccgactctttgtgaccccatgaatcgcagcacgccaggcctccctgtccatcaccaactcccggagctcactcaaattcacatccattgagtcggtgatgcattccggccaaaaaactattagatgggcaaaaactgaataatgaaaaatagttgtttgatagaaaagaagaaaggaagcaaagggagggataggataaaaaatagtgacatgattgcttatgaaggaatcaaattcatttttctcttccatacaagtataattgattcagcacaattttctgaaacgaacattcttgtcccactatattgcaacagtacctctgttgtaaattatgacttggtcttactggctgtaggtcagaagtgacctcttcttggaaatcatagatttgggttgcatccattctctgttagatctacacgactttgggaagtctctttaattgccagtacttttatttatactataatccctactttggttactaattatttgttactaattatttacataaagcacaaagacttctattactaaatattcctatctagaatatttaaagaataagaacctggttttacatttcattcttcataggcctttacatgtgatagatatttagtacttactaaagatagatcggcctcctagggaaaaaatacctgtctgcagtttgtgtgtaaacgagaaccatttttttcctttaagtttttctgcccctgccagttgaaaacagcatactggatttgccctcagggaccagaactgctggctgtgttttgcagggccagactggagttagagaaacgtttgcaggcagtatctataatctactacatgctcctttctcccttcgcttgcccctgtacacatacacatcacaggaaaaagatcaccagttcatcacaagtggcgggctttctggaccacaattatcatatgcattgctcagggaaatactgcttttatattcctacttgcagtgttgacagcagctatacagtctccagacagaagctttttataaagcgaattttccattgtgttctaagactcttagaaggccagtttctaaaagctgaagataggaattaactggacaggcagctccaagttccccaccattctcagcataaccctgaggcaggtagtaagaggtcctgtttccctctcggctattctgccaggttagcatgtctagtgtcacaagtaactacttttttttttttacattgtaaaaagggactgacctgctcagctgcttcttttttggcattgtaagtatccaggtgttcctgcagctccaaaacactgaactttaatggttctagcaaatcacaggacatcagctgtcaaatcagaaacacattgatccagatcaccatttctgatcacaatcctgagaccaaaacctttgggttatgggttagtgaattttcaagccaagttaagccagcgtcccctactgccaactgtcctgtagtaaggactgacctttcactgaaacagaggaatgtggtgtggtttgaggaatgtcagaaaggataagcatgccttctaatgctttcaaaacctggctcaggcaaaagtggcatgtcccaccagggtataccttaacagtaatacacttgaagctttttaaaccgtaattctttaactatcttaatacataatctacaaatgtgcttggagacaagtggagaagaccaggaagttctgggttcttcatggtggtggtagggtggggggggagaggggtggtggaaatgtgtctagccctctcctatgagctttgattcaggaaccagggaaaagtacgcatctctaagcatgattccttagcttttccatccacgactctctgaaaggtgagggcaggatgaggtcagaatcagaaacagtcacaagtcactgcatctagtacatgggaactatattttgctagatatttataatcaagttgaaaatatgaacctttagattttaaaattctgaattacctttaaaaaagaccatttactgagtgatgccattccaatttactttttatgataaagtaagcctcatgtaaaaacttactgtttcagcatctacaaagactgttgggcattctgaacacatcatcatcacttccaatgagcttttaaatttggcaccaatgcgctgcagactcccaccaagaaagctgactgcctcattagttatgtccccaaactttctttgaattgactgtggagaaaatataagaaaatgtatttcatatgaaagcctttcttaatctttaagtaaaaaagcataatttataatgagagcaaccttctattttaaaactatgattgtagtgatatatacagaaccctaaaaatcaatctataaacccttatttttaggcacttctttaggaaacatgataatttctaaaaaaacgatcaaagatttattgtatagtattcctgaaaaaggaaactaatgatacatgctgttcgtctccccattcctaagatttttttcattaggaaagagaggagtatgtgatagatattgcaggaaataaagccctcacatgcacgaggaattagagcttccaaagttaaattctaccaaatgaaactttcagtaaaagtagtttactctcctcggatatgtttatccaaggagataaactatctacttggaaagtttactctcctgctgacttgaactgaagtcatcaaaatgcaccaagggcagtatcttctcaaaactcaagaacgttccttcacacagaaccatcaaggcctaaaccaccgtgagcacggaatgaatcagatgctatgccaacaacgtaatcactctacagatacttggatctgtgcctacatgtgcgtgtgtagcaccgttcggtgccattatgagagatttgaaacaaagtataagccacagtctcatgcatggagaaatctgtgtctctggaaagaaaagaatataaatagaaaaccaagtagcaatgcaaaactacaaagttaaataagcgctccagttaataagcactgaagaactttcaggagagagagactgaaggctgggaaaacttcagtgagattatgtaccgagttgggtcttctaagatgtgcaaaatttttgcttaggtggggtggaaaggtggcaggtagttgggaaaataatgacttaaatgtcagccttggtttccctagctacagaatgctaaaagtacattacataggtctgttgtaagaattacttgctgtaaaacatttagcctagtgccttacatgtagtgagtactgaataaatgttagctcatattactttcagggatggaagcatacttggttaaaaatgttaaggtccccacacagtaatgaaagtgccaatgaattgaacactttatgacagattgtcttatgatagtgactgaaagctccttaaaggcaggaaccctcctttatatttctttggtgtccccgaaggtgcctagcatattccagaatttgatcaaatgttatttggaagttttactctaattaccttaggggaagtatccgtactagtcactgtataatgtcgtagcagtgctacaatgtcaaagtgtaaatttaaattatcactatcttaggaaaataaaaaaaaaacttcaaagaaaactagtgagaatattaaaatttgagatactgattttagataaaaccccgtaactttatcagataaccgtaatacgaattcagaagtctccaaccttactgacctgaaacagcctagaaaacacgtgaaaagtaaacactgcacaggacccgtcggtgtcagacagcatctgattcacgtggcagcgccaggcttcctcctcgtcatcatatgctactggctggaaagcggctatgatggcagagagaaacggtgatggcagaggtgatgtctgcacttctggaaaaccatcttgttcttcttcatcttgactgttaacacatacatagtcatcataatattatcttaaaagaatacactcaattatttaaaatacattaagtcatctaacattatttcttacatatgtacacatactgattcagaaaatgggcgaccacctaaattttgtgagcaagcatgaataagcagattctcaccctgttctttgtagcatcttgttctttcttagcatctttggatttagaaatctaatttcacacaaccaccttaaaacaatcctacagtagggcttcccaggtggctcaatgggtaaagaatccacctgaaatgcaggagacgcagaagatgtgggctcaatccctgggtcaggaagatcccctggaggagcgcatggcaacccagtccaatattcttgcttgaagactcccatggacagaggagtctggcaggctacattccatggggttgcaaagagtcagacatgtctgaagtgattgagcaatcctacaatatgccagggctatggaataatttcagtaccttctatgactaatacagactagaatgacttcattttaaatggtcaatttcagaggctttttatttgaacaggctcaaattggcaatcatgatattttcaaagtttttgtcatgtacttttgtgtcaagggctatatattaggtgccttacatgggctgttttcattcaatcttcacagaaactctatgagagttaagtactattattatcctgacttttaccagtgaaggacaaaaagttcagtgaggttaaatgatgtgcctaggctgctgggtaggaaatgacagagccagaatctgaggccagttctatgggaccaaacccagtattataaagccatgaggcatgctatgtgcctagcagtgtggcactaacagatctgactcaaagagacagaagatctggcctttttttctttttttgaggaatctataatccccacagtcagataatatatacacacaaacataagacaatgaaaaaaaaagggagggatatatggtatttgggttgagcatcccataaagaaacgtgtgaccctgggtcttaaagaggtgtttggagtcagactccagaaagaaatgtgttactcaaggtcttaaaattgtatatttcacattacaggcctccacaagaccattcagaaattatggagcaattcatctagaagagagggatctgaaaagactggggagaaaaggtcaaaaggaagcagacatttgaagtgaaaacttaaattctacctcaaaatttaatttttaagatgtcactgtggtgattgattttaagaaaacgtatcctgtaaccttgagcagatacacctctgtatttactaaggatgctctacttattgtttcatcttttgtacttggccaaagtcaactctcttgtctgcagccttttagaaagccagatatctgagtatcattcctgcgtcattcctgacgtctctgaatttgtgtatgatcaatgagtgagtgagtacatatgtcagagccaagtcagtgacatgaacaacatgtgtcaccaggatcccttgttaatatctgagtgtacactttcaaatacaggggagcattctagatacactgagaatgaaacacctccttatgtgctgtatacgttaaaacacttatcacttgaagtataaataaaaaagctttaattgtaggagtaaaactctgatatacttgatcattaaattttatatgagcttcaaactgttgaatagggaaatagatacactgacagataatgcattaaaattagatgcctttataaagaacattattttgagccacaaatgtttataaaattaaaaaatataaaaacaaaacattaggtaatagattacatcataattctcatcactgaaggactattttgtgtttaagtgacatgagtgacataagccaccagaatttcctttaagaactttatgtaataattcatcattcaattctgtctggtaaagaatccgcctgtaatgtggcagacctgggtttgatccctgggttgggaagattccctggaaaagggaaaggctacccacttcagtattttggcctggagaattccatggactttataatccatatggtcacaaagagtcggacatgactgagcaactttcacaattccgtcagcccgtgattagaaaaaagtcctctgtgagatttcttcatactttgtggtaattttgaatgtatgatgcataaacatttaaaaagtgcactctaacatttgacagtactaagaaatgatacttctgcccattatataagtcaaactttataactattagtaataagactataatttttggaatgtatttcagatttgttttggtatcacagaagttccttccataattttgatacttgggtccacccacggcccaatatggattttagcacgtgggcacttggcattctgcccaaataggtatttggtgtacttctaaatgtagactcactgtgctctgagaatggcctatttgtttttctttaagtgaacagcaataacagagagtaaaaccatggcaggaactcattttacctttaaaatgtacacagaaatgaaagtcggtttactggaacagagggtcgtgttcgggaggggacagggtagaagcatcacctcatcgccgtgtctgcgacactgtactctcacctcgacagccccgagaagtctgcttcctcctcctcgcatcgctcgtctagttccttcagagctaaggtgacgtcttcctcacagaccgacccggggtagctctcaggacctggaggctctggcaggtctgtctcctctagatccagaatcccttgacacacgagagagtcctgctgttcttgaataatatacgacccatcatcttcaaaggcggtaagaacctgttcttcctttaatactgaacttgtatcctgaaaaacaattgtattttttttttttacaaacttttaaaacattaaaaagcaaattttaccaacacagaataaatgactgttgccaccaatctacatttattttattaggcagtcttcatttacacagtttgattttgggagtttttggactctgatcacataaaattgttttttttttttttttttttaatagtttccagtttaaaaccctttgaaattaaagtgtatcactgactgccacacagaaacatcaaggagatctttcttcaataggactcagctgtttacttagaaatatatcctttggggaaatatcttctctcccacatattctaattctccataggtagagctttatattaccactataaattctctcttatggaaatgtcatttctttcattatgctagaacttactctctagcgaattctagatataagaaggggaggtaattcagaatgcttaacccgttggttctgcggggctacctgtgaatcacgatcaggtcttgaccagtcaggacgctgttgaacagaaacgacgagggcagcctgactggcgtaactgagctgaatacctgggatgtatgatttgctttcaggtaataaggttataataatttatttagatttgagtactgggacatcttcaccactgagttaagaaaatgctggaaaattttagactgttgtactcttgagaattaaatgaactataaactcacttatcaatgagggacatgataacggaaagcatgttgtggcattttttgctctatccattgtaacgttactgaaataatgttgatacatgtgcctggcatggagtaaaagttcaacaggtgttggctgaataaacgagctaccactactgaaaaagaaaaatacttccagggtctagatcatgacatcggcaccagttttaattcacatggacattggttccatcagtttgaaaataagcactaatggtctttcagtttctttcaggacttagacctaaggttactattgagtcaaacagcagtttctcacctctttgtcacagatgaaaatagaattttcccttccaaattatgaaaagtaagtgaaatccagcgcccctgatcttagaccagcctgggctttagttttgttgtttagtcacccagtcgtgtctgactctttttcgaccccatagactgtggccctctaggcccctctgtccatgggattcttcaggctactggattgggttgccgtttcctcctccaggggatcttcccaacccagggattaaacccatctcttcgcatctcctgtattacaggtggattctttaccattgagccactggggaaggccgggtcttaatttactcacctgtaaattcatgtataacatgaaggactctgggctgagtgctctgggataaattagtaactaactacaattagtgtgcaaactaatacggggctaattatgcaaaccacaataatatacagtagagtatcgtaagtgtaaggaatgacaaagatggggtagcaatagtgcaataaatgtttctgtcccctcaaaattcatatgcagaaaccctaagctccaatcccctcaaaattcatatgcagaaaccctaagccccagtcgggtggtatcagaagtggggaccttgggaggtgattaggtcatgagggtagaactctcatgaatgagatcaggcccttaaaagaagaggataaagagctattctgttctttcccaccatgtcagaacaaagcaagaagagctcccaggaagagagcctgcaccagacagcagttggctggcaccttgatcttggagtttctggcctccagaactgtgggaaatgcatttctattgttgataagcccctcccaccccaggtgatggtatttttgttacagcagccaaagctaagacagatgggaaaaggacctgcacgaagtgtactaaggaaacacctggtctggaatagttatgcagagaaagtacaaactctgagtcttcacaggatggtactttataaataatatggtctaatcattccttatttgctgcaatagtttatattcaatacactctatttaaggtttccatctgaatttttttcttaaagatttggccattaaacaactaagaattagttacttggaaagatactgtgagtaatagtgccagagacactgctacacctagaattttcattggtattaatttttccttgggcatcagtttaaacatatcgtactgaaatgatgcaccaccaaatttcttggtttaatgccattacttttcattggtgcatacctgtgttttattgttatttgttcttgaataataatttgaaaatacatgtttcatctaaaattataatgtatgctgaaattctctagtaactcctaggtttcatgaagagagaactttttggctaatggaatgaattccactattatatgtaaatgctgagaatcaaattttcttgaacattaccttattgcacagtgactcctctgtctctctgcctcacacacacaaacacacactgtcaaagtttcattttgtataaggaataatttctggcacgcatgaattggtatctaaactactataaatattagaagaaatccctctgtggaggttcttctgataaacacaaggatgtaatcccttctagaaggaattagccaagtaagaatattggagtgggttgccattcccttctccaggggatcctcgcaacctggggatcaaacctgggtctcccggatcacaggcgggcaacctgagctcttaagttttctgtcttgaggtagaatgctttagcttattatggcgtcctaatattacacaattcaagggcagaaattcaaataaacatttctaggaatttttttctttagttcataaaatatttcatccagtgaagttaactgctttcctcatcttaagaaattgctttatagcgatatgtatagtatctgtaactcacaacattatataatagggttatggttttatttattagtgcttttatactttctttaaaggggcaattttgggttacgtgacactatttgtcacaccaggaaaaacaaactaggccaacatatccaacagatacaaacctgaatcattctcttgtggacaactgttcttctggtgaatttttatgtcaacagaattatttttaaatgaaatagtatgtttcaaaaaatatccccattctcctctgtcagtgttacaaagtttatagtgataagggaacacactattgtaaaaggaaaaaacatagtaaattttaaaagtgtttttccttcatttaaaaaaaagtgtccttgggaacttgatagtgtgttggaagtaggcccattagatactgttggatatatgaatgactcatctgaaataacacaatttccagtatgtatgggaatacatatgaatttccaattcatttccaatcaatatgaatgacttccaggaggtagcttacttactatgaatacagctattttaataaccaaaactaaaagattttcctgtttgttaactatttgtatagttaaaacacaggaccattaaccatatcgcttttgttaaaaagctattttccattgtttctaatgagaatgtctgctgacttataacatgctacgagctatcctggacacaacagatcagatgatcaatgagtagctaacgctcacgtgacagccttcccatactgaaagaatacagtctacttcaggtgcagttctgaagtctgctcccttcataaacaccttcctgtccacgcactctgtcacttaaggctccttatctcctcctaatatgcttctggtgtgtctcttcatctccgccttctccaaccctccctccacacctctgtaagagactttactaaaacacaggtcaaactgtaaccttgcccgatgacggactgcaagctccatggaggaggtacaggtacgagaacacactttcacttttccacaaaaaagccgagattgaaaaaaataaacacgatcagattatgccctttgggcttaaaatcctctagttgttgcccgctgtgtggcctctaagatcacccttgtgagcacctggccccctccagctccttctctcccaatgccactctctcaggttccctgcactccagctccacaggctgacattttagctcttcagatacctgggggccttttccactcctgtttcctgggccccgaactcccttcctccacacttacaatgactggctccttctcatcacttgtttccaccagatgctaccctcaccaaatccatattctcgttagattttcttaatatgggtagaaaagggataactttctgatatatcattgatattttatgtttttacctgtttactatgtctcctgctcaaatgaagctccataaaccagaagcctttgtctgttccacacggcactgtgtgcccagggctaggacagagcctggcacatggcggggctcagtaaacaaatatgcttaaatgactgagtgcttgggtgccctgggtattcccacccaggtatctgggacagggcctggcacacaattggcatctttggaaagaatgaagattcatgacttcctatcgtttcaaataaagcctgcccttagtggaacccagcgtgtcttagatccatccatctttcctcctgccgctgctgctcctcctcttctctagagtgattcctgctgctgcctgcacattccatgttatttcacatggctgtgtctttctatgccatgtccctctgcctgcagtgtctcaaatgccacaaagcccgttcttcgccacgtaacccctaatgcacagctgattggttctcactctgagttttcacaaagccttgagcatgtctgtttctgagtttctcatactgacctgcagtgcttttttttttaaaaaaccttctgtctcccttaatagccagtggacactctgaagacaaggtcatgctttactcatcttttcagcacctaatggaatgcccagcatctagtaaatctcaatgaatatttgttgagttatctaagcttcagccatagtaatatgaacatttaaaaaagctaccccccaaaagccttcatttcaaaatacatctgcttactgtaaagatgtatgatacactgttggtgtaataagaacatgagatttctccttactcagacaataatatctaataattagactggtcttgctctgataactatattaatttggttaacactgaaaaaaagtgtagtattttcctgataccagggcatacataacagcacatatgaaagagctatagcaattacagttttttaaagagatatctacagtagtcttaaaaaggcaactaagaaaacgaatactcacttatttttggtcattagcttggaatctggcttacttctcacaggcctttccaaaaaacataacactggtagttccacagtccttctaaaaggtttcatttaaccaattgctaacacagctggcctgaggttttcatcccaattacagcaccaatcacaaaaaacaaacaaacaaaaaaaaacccaaatacaaagcaaaaagagaagaaaaaaacaaaagcggtccttcagcacccgagaagatgctcccatccccggagaagcgccggtacattaacctaatcacgttctgcagcaggagatgctcattaaaaacacttagggttatttttaacctgtaggtcatttccttaatccatcactttttttttcttcagtgatcagatttgactattggactaaatcacttaaccaacaggttagaaatactgcaaacaaatcaaataattagcgtatcagatgaaaactcctttgaaagaaaagcaaggggtatcacagattgctaaaaagagcccagattggccatgcaccagcccccgtgactccccacctcaggcagctggctgttagccttatctagagaagcttccaaactgggggtctcatctctgatttgcagaacttcttctgtggagaggctgccagtggaatcttgagactgaagaagtaaatcagaatggtcctgcagggtttcgtctgcagcagaatcgttatttaactgaaaggagagacagtaaaataaggaaatttatttaggagttggcgatggtcactaaggctacaagaaacctgtgtcataagatattctgaggccatagttataaagagcttctttgacttcctaaaaccacctttcccccttatttcagtctgtatcagaattggtgcaattaatgcaggcagctagttcatcagtagaaattaagtctccattaacacggattaaattttgctgaatagaaaccaccaaaatggaagagctctatgtgactatgttaatcttcatctaaaattcttatttttacggtaatgtcttatgttttcagttggcctaaggattcgcgaatgcacgggctttttttgccttcctgtggctttggcaccaagcactcagtggattcttaagaagcagtgttaactggaggcaggtgcttaagaatgaactggccattaacttactgaggcactaatcaataccacagaacttcaataagacaaaaagaggacaatgaagctgaaatggcaggccagcattagtgggtttatgttctttgaaaactagcagtaatcaattagaacaaagaaaacactacaatttttcttttaagcagggctatacatttttcatggatcaatatttaacataagaaaaatcaagctcacgatttcgagtagataaaagcagaagctaattttttacccctatgaggaggaagtagcttcaaattctttttcaatttcactaccactataacagggcttccctggtgctgctagtaaggaacacgcctgccagtgcaggagacataagagatgcaggttctatccctgggtcagaaaaatcccctggagaagggcatggcaacccagtccatggaaaatcccatggacagaggagccaggtgggtgacagtccacgtgatcgcaaagagtcggacatgactgaagtgacttagcgtgcatgcataccactatgactaaggtcggccttatgaagagacagttctgccccaaggctctcatggaagctaacctttgttcagcacttactatacttgacttccccatgaaatccccccgaggcaggtgctgccaggagtcctgttttaaaggataggtaaagataggtaatgatcacagttacacagtggcacgatgctagtctctgagcctccggtctgacccccattcagtgagtcactgctgccagcaactcactgttcctttaaatgcacacagtcctggggaggagcaagccttaggtggcatccagactgccctgctcaaatgcacttataggctgtgtgtcctgggacaagtcacttagtctacagagctgcaatcagtgtgcttaccttgtgtagttgaggggagaggtatagtgactaatccacgtaaaacaccgtgaccagggcctggtgtatctccaacactcagcaagtggtaactactgctactgtgtcagcaacagcttatcacttaatacgtgacagggagttagggaaagacatattggcataatggtgagatgccaaaacagggcaggtgacaagaagcctgccacaaaccgaaatgtacgtgttgtctaaagcccagctcagcctggccattcaacagcactaccagcactttaccagcagactgagtgtgtgcaaatgggccaaattaaacaggggcggtgaaaaaaggccctcatataagagcgctgtaactgtggctgccacctggtcttcaccagctgattcctcatcacatgggccatggtggctaattcacaccttgctctctccttgttctgccatcttcaagttccaacctactgccactgcaagttcagcattcccctcactcaatattcggaacagacagaccatgcttatagccttcattttctcgtctctctctctctgaatctctgccattcaccgctggaatgtaagtcagaacctccatataactgacttgatcttgcaaagggagcaaagtcgtgctctctctttccacactgacaaggaagaaacgcaggtggagaattaagcagtgctggtgtttgcactgataccaaaacgtatcattcagggtgaaggcctcgaaaagtgcccagcacagctcactgtgactaggagagaaacaacagaaaatatgtctcatcagctcagaggtgctgtctgtgctcaatcgtgtctgactctgtgaccccatagtctatagcccaccagggtcctctgtccatggaatgttccaggccagaatactggagtgggttgccactgccccctccaggagatcttcccgacctgggggtcaaacccgagtctcttgcatctcctgcattggcaggtggattcttttaccactgtgccacttggaaagcccaagcggtgcacagatcaaatgtttagttcccatcatgaataatggaacactctattgctgctagagcgttgtgttttcatttcagcatgtgcattttacccacagtgaaatgaaaatcagaatatcgagcaatggtaattactaagtgggaagtgaagacaaagaggagaccagctgtcactgcacaaaaagctaagtgtaccatctgcgtgcgtgagagtatctggcttgccgtgagcgccgcttcctcttccgaggactcgtctgtgtcctcctggtttgtcaggttcaggctgggggtgctgctggagcactggtactcctggagagacggcgtgtcccctttgtcaatgctgtccagtgagcgcctgcggactccccagttgaagttgtccatactttcaccctggaaaagcaaggcctcatttctaagactcaaacacaagcttataaatatagggaaggtaatacactaggagaacatatacccggatgaaaaatactcagtgtatcgtcataagcagagattcaatcagcccttcaattttttgaaacttttaaaacatcactcaatattaaaatatttaaagagatcaaagtatgtggtcgatgacctgttttaactgaataggattctcttgactttctatctagtggggaccaactaaatcaactacctaggccatttctactctaatacacaaacacaaatgagaccacaaagaagacaaatacattcacagatgacaacaaataaataatccagaacgccaggctgcaacttacctgcagctcctggatagcaaaaaggaaaacacacagaattagaaagaacgaagacacacgtgtaaatatacactacacttgtggggaaaaaatgcttggtgatttctcaaacccaaagactgattcaagctctggatgaagctttgtgcaggaagtcaacacgtgattcacattatttttttatgcagaatatatcgtggaaaaagagacagacacttaaaacaacatttctatgatacactctggcaacacaaacttcaggaaatctttaaaatttacatagatttaatactggatacaatgcaaaaccgacttaaaatatccacattcagttgacaacatacaggttcaacaattattttagactgtagcgtggttctagctaaatacagtggtaattttttgctaaagaggagtttaaaatcaagatcacagttatcaaaacataacctaggtcaacttaaaaaggtcaataggaaataagcaagtttctgctttgccccacttatggatttatctaagttatgtttctgttattccaagctgatcctcctttgataaggatataattcttatactctttcttaagctctaatgacaaattacagtgagctggctaacaaaatctgacttatgtatattcctttatcaagagggattgtcaaggatagaggttttcagatcttttttttcttaaataaagcagaggaatactcatttcaaatgaaacatacaatggaaatcaactgtgcaaaagtgataaaaccggggctgtggcaacagccctcaatatgcatttagtgaatgaatgaatacttgctgtgggctttcaaggctggggaatattttagaagtttcattagcagttaagtttattttgtagcaaagtatttactgttaccatgtccaaagcaagactaggtttttagaaaatctcttatcatttgatttggcctaattatgagacctaagttagtatcacctcaaattactgtgacttaaataaaagacaaaagcatttttaattcattctagggttctattcaaaagccatatttattactaggaacatttcagagtactagataaacttgaaagcaattataatgatctaaaaaaaaaaaaaaaaaaggcaaacagaaagaacctgaccattacaaaaacataacagcctacctttagagcttctaagctctgaactgaaaaaagcaaataactgcaaaagacttcagaactggcttatgcctgtgagggcataaggtctcttgaactcacacttccttgcctaactgtgtaggtttttcctagttcctataactttcaatgttttttaaattgtgggagtgacagcagttttggagggtgatgacctgctctttttggaaaaaaaaaaaaactgaatagaaaatattagtgtacttagagtaagggtgcatattctttaaacttttaaaggtgtgtctactgagatgtgatatgtgatgtattcgcaatggctatagttttttaaaaaaggctaaaagccactgccctatgacactgaataatacgtgttcctgggctccgagaacctgtccagctgcgtctgggaatacgcacgtggtgaacagtggccacccctgagccagtgtgagggcatctgctggaccctgaggcaccatggtcatatcctcacatcctcggggtggtgggggagaggaagggagtggtattagctgaagcatacaggaagacctccatacactggtttcctctcaaaagtaatggtgtaacgtggtggaagccgtacagttcactcctccacctcatctatttgagtcaaaggaaacatcccttcaaagaggactgatggatgcgcagaagttatacgagtgacttgaacatccttggacagaggtatagcatgacatggtgtggatacctgacagtaaggcgtttggagctcttgaagacagacatttataacaattttaggaggaacatttctgtgatctgtttgaggtacacgtttcagatttaggagtttgtggcttacgggactaatgtcagctatgggaataggtcccgaacagcctgacacaaccagcgtgatgggcaagcctattgctcattgattttttttagagattggcaaatgtctcagtttgggccaaatgaggtgtgacaagaagtgtgctgaaaaccttaggagagttaacttcttcactttcctgagagcctttatggaagtgaccctcactttctctgaacactggcacgtatggacataaccaagatcatttgaggtgaagccaacttgcagagaaacgcagagcttagagaatgcaaagaaacagccaggaactccactgagctttgcctaacaagctctgactctgggctagcccagttctgtaagcaagtaaatttaccttttgagttggacattccacttaggaagcatctaaactgacacagctatcaaatttctctaaactgaataagttttaaggagcaagtccttggtattgaacgaaatgaagcatttgagagagatggctccaccctgaagaagaaagtggtaggtaatgtcctgggtagaatctcagtcacagaaaagagttcgagagtgccaaagccatcttaatcgtcaatctggtttcagggctaccctcttcaaagctgtctgatagatttaaatgaaacttttactcttctgctgcacattaatttgtgtggcttatgcaaacacttaagtctaagcacgccctcaattaaaaaaatacttttgaaaaaaatccatttttactctatattttgaaagataaagtggaaaaaattagatgttccttttatttcagacttattctgctattgactaactgtactaatcatctttagttcccaacttagatttgtaccttttgacgttacactgccccaaacaaggaaagattaaatccttatttaatcctgtggttaaatccttcattctcatgtagctgtacctattctataaatattatgaaagcccatatccttacctctgcatcttccaactcaacatctaaaaagtcaaaatccttaaatacgccaaactgttgttcgctgctattatcttccacagctacttcttcctcttgaattatgtcgtctgttgcagaaatgaggctagtttgttggtcaccaacttccaaatcctcgttagaagaaaatacaacctgacgcccagccaaaaacaaaacaaaacaggccgtccattagctctgtcactccgaatatgggacaccagggccctaggagccactgcaggccccttctgtcagtgagctcagagctttaatttgggcaaatgtctaactatgtggatactgaattagcacagtggccaagcgtcacaaaggcaagtgacaattttttcattcttagtcaacaccgttaagaaaagacaaacaaggagacacaataatttctgtttcttcatggactaacacttctaagattttttaaaatccttacacaggttttcatgattactcaccgatggattctttggaaggccagactctggaccacagagagaaagcacattcattagcttttctcttgttcttcgctaaagagaaagaaaaaaatgcaaacgttaagattactaatgaaaataaggcaaattctcaagttctcataccataaaactgattcttctgttctatgaacttttatgcacctgtgataactgtggcctcttccaactaacaggcaccaaggcattagagttagaaccggaagaagtggaggaagtgcttcttgtcaccgcgatcactttgggcttcccattcctaccagctgcgctgtgctgatcaccatatttatttccaataattggtgtctacaaagaaataaattgccagtgtttgactcacacagttcaacataagtgggttaatagtgtatctgtgatgacattttttacaaacaatcaaaaaaaaacagcataaaaagaaagattacttagcaaaggcagatactacaaaaatcaaaagtaacaatgatacttttttttattagtaagatctcactttattggaaacaagactctgaggagactgttggataacttattcctacgttaaaaatagatctatctgttgtctttaaaaaccaccgtctacatctttcccccaatgattataaaatatgtcctctttgaaagctcagaaataaaaaaatgattttacaaaatcaactgtcatctcaccactcatatttaatgttggataacagtttggtcagactttcctagtagctcagacggtatagagtttgcctgcagtgcaggagacctgggtttgatccctgggttgggaagaacccctggagaaggaaatggcaacccactccagtattcttgcctgggaaatcccatggacagaggagccttgcaggctacagtccatgggggcacagagttggacacgactgagcaactaacacgcacaatattttgtgggtttttttatgtaattgttaagtacgtgtctaaaagtgctttcgcaaatattcaagataagtaacaactgcaaagtgaaagctatcatatcatgtcttattgcaaatctaatatatgacatttccaaaatttatttcagtaaaattccgtgacgaatccaaaatggtgcttacctggctttgtgaagtgtctcaaatttgcatctgaatataattttaagctcacctgcatgtcatccaagtccctttatgatctggttcctgcttatgttcccaacttcaacttctgccactcgctcctgaactttgcactccatcaaagctgaatttgtttctcaagatatggcgcctttatggacctttgtgttgacacatatcccctcctctgcatggaacacgcaccaagcaaaccctgaggcactttgaacgctgcctccacacttccaaggaggcccatgctgatgccaccaccacgtctgggtaattactcttggacgtttactcagtgatgttgatttgtttctttgtctgtctccaattgctatatgggagtccctagattgagtgagactcattgctgttcctctagtatatcttcagtgcctacacatagcaggtacttaggaatttttgatgaaataaattgaaattaagtatctgattatatcagatgttctgaggattcatattactcttcaaacaaaataattgttacattatcaatttctgactcagaagagtagcaaagctagttctctataatattaccacgctgtgtattccatgttaggaattctcaggtgatattaactaaaacactagcaacaaacatactttatatcttaaaaaaacataaatcaataagcttcagataaattcaacaccaagtgctgtgctgtgcttaggcgctcagtcctgtctgactctttgcccacagactgtagccctccaggctcctctgtccgtgaggattctccaggcaagaatactggagtgggtagccaccgttcccttctccaggggaacttctgacccagggactgaacccaggtctcctgcactgcaggcggattctttaccatcttgagccaccaggaaaagccctcaaataccaagattaaactgcaaattaaaaaaaaatctgtattatccttttcaattaaaatgtgagtagattttcaattgctatctttcttaactccccctaccctgcaaaatattgattgataacttccctcttaaacaattcctgctggtctgttttctttcctattcccagactgatctccctaaaacacaaatcctaatattttctactccagctaaaaaaaatcctttaagagctactactacgtcaagatataaccacctcatctggcaatatcctaatgattgtgctgctccctatggcttcagctttctctctcatcacactactctatcctctgtggcacaggttcacggttggccatgctaaatagaattttccagaacaccatgcttcctcacacttacaagccttcattcacacgtgctgctttatctgggattaatcccccctgcccacacttccatgtacgctcccatttagtgaggtcaagttagatggacatgctatatactcctataaaacttcaaacttacttggcaaccaaagcactgtgtttatttgcctatctcctcaagaggctacaggcgtgctgagagtacgcctttttcccatgcccacctcgttttcagggcactgtcacagcatctcctgctgagtatgggctcaatcagcgcttgattaatgacagaatgaacaaatgaacatttctaatacagtgcctttaccaatacctgagcatcttacctcagatatatcaaaatgaaaatccaaggtcttcccaggcaactccttagagacattattaaaaattttagtgaaggatatctcaggagagcccatatctcctccgtaggtcttggggatatcgttgggcacgacaaggcttgctgagcgggacaccaccagttttaagatgttaagggcttccttccaataaggactctggtttcaaaaattaatagacatataaaagttacaaatacgtatgtaactaagaacaaaaactcagttacattgaagacagtgaaaatattatttctataaaaattccttgtcaattattcatttttactctgaggtccttaactgagggtctgagttacacaaggatagaaaataagttattatttctactgttagatttataagatatatgcataataatgctaacaactcaggatattttgcactgttctcaataagtgctttataaacattattcattaagaaagtctaatacagtaatctggcagtaggggtaagccaaagggttgtatgtatgtgaactttctagatgaatgaagtacatggccctaagactctaaacttaaaatgttttaagcctcggtgataaaccatttttaatgcatcagattacttagacataaaaatattaaaatatttttaaaatttagatatttcttaatgacccaaataataagcataagtgctgtgctaaaacaatactctcagtgattcctgacctgtatagggtgagctttccccctcatatatggtggcaatgtttctgagttatttttctgctcttttcatatttctaccagtataatttaggaatgatttacatgacagatatataggtggagaggaatcaatgtctaattaagaaattagaacatttctcttttaccacctactgaaaagaatcatgtaaaaaaaatgacttttttcttacttgtggtactaaaatcacacctcaactttttattatacatattgtttcatagttaacagttctgaaccaggtaaaatattactaaaaaaaggaagtgaaaaagtccttagcagaactgagttttccaatttattttaataacatcttgatatgaagccatctaaagcacaaaatattagtgataatagaaatgtccaaatgatattgtgacaatttaagcacatcactatagaaacagtttaacaaaattaaatagaaatcatcttttttttttttcttatggaaaaaaataggagctctgggtactgtaaaatgtgtaagcctcttcagggatgttcctgtaaattatactggtagttgtgttctaaatgtaaaagaatgcttaaatgtacttgcttgctgaatcctaccattcagattctgctttatgtcattcacactgagaacattttcccatcttataaacattcctgaaaacatggtttataaactaaccacttcccctgttcttaagacgtttaaggtgtttccaattttttacgactatatactgtttttgagatgatcactttctatacataagatttgtagctactcacctgtacgtatttgccaatgatctttatgatctccagattaaactgcttcactggggcagcggagaggtcaatatgactcaaaagactgtagatgatctgcagtaaggactgctgcatactagacagtcctttttccagcagctaaaagtaacatgaaaaataaatttcaatcaggttcaagaaaattccattgtattgacattgctgatgttgagaaccacaatacagttaacctaagagttcatggtcagattatcagaaatccagagaataatgaagggaaaaggtaatgtttattattgttacttgtccttgcttcagaaaggagaattaggtagactgttttttcttaaccttagtgtttactttcatacccttaactaatttaattgaacaccatttattttaaaactgctctaccaccattaccaaagaataactgactattcccaagccattcccatcagctgatgactacccatgtaatcttgggcaagcttcttaacctctctgagccctgatttttaaaataaaaagtgataccactttcctattagggtttgtgggacaattaaaattatatctgtgtaattttaaatacatgtaaataattttagtactgttgttagggataatctgagattcattaataatcatagaacaaggataacttatactaataagagtaacatttggggcaaagcattctctttacagactggaaatatactgcccatatgtggtacccaataggctctaccgtgccagtgtcagacctcagaaccccacgggtcagtcttcaggagagctagtgttactctgtgatgacgtgctcagttgtggccgactctttgcaaccccatgaactgtagcccaccaggttcctctgtccatgcaattctccaggcaagaatactggagtgggttgccatttccttctccaagtgttactttagtgttgggctttatggtggcacaaaagtgaaagctggattaaggcacttgaagccaaaggagcttaggtcttaggtctggctttatgttggctcttgtcctcaaggtacaggtgtgagataaacccagtgatgcacattcattcacgtcagggagctctcaggcagacagctcactctgtcagctcacttaaataaaggtgatgggagtaaacctatcaaaacccataccctaaaaattcacaccatcttgagcactttatgatgggcaccatcagtgacttggataagttaaacagtgctgcaagcaatacttacgattatttgagttacaaataatttaagtctctttgtgtgttaggtttaatctctagaggtcagctttctaaaaaggaagatagcactttattgcaagctgacaaacatttttagtgactaggaatttcttccttttgaaggtctccggtattctctactcagtaacttactttcctaggcatggagttacttcttcaacaaataaatacagtcgactcttgaataatacgggtttgaactgtatgggtctgtttatatgcagatttttttcaataccacagcagtacatgactcacagttggttgaatcacagatgtagagggctgactgtaagatatactcgaaactgactgtatggagaattagcacccttaattccagcgctgtgcaaggtcaactgtgttaactttttatgctgttctaggactagttttaaattctatttactgcccccctatcatattttagattaggaggtaaacatatcaccagaataaatacttgcccagcagaaatggctttacatgctatactattattctagaaagaatttcaaagccaagagctaatttacagaaacaaaaaacgaaaaccatttcctaggatcaagaccatgggaaaaaacccattttccattttaaataaaggtgaggtttatattattttgagttttgtgttatttaaagacagtgaatgcagaaatacactcaaaaccccactttccactttaaataaagttaaagtttacattattttgagtttataccacttaaagacagtgaatgaagaagtaaacattgaaaatgaaaaaaaaacacctcatttgtacttgaacaatattacctatatgttttttcctcttaaaaaagatgttacctctattcattcttaaataaaatttgaaaattagtattagtgctgctctagaaataaatactcttgaaaattctgtcacagagcagttgaaagatcattttatgggggtaaatttacctctgcaagataagtcacaagactaaacgtcgtatctgagaaggagtcatgcaggtatctgcatactacgttgatccagttagaacaatctctggagtacgtgtgtgtactgtacaggctcatcatgtgagccaggttgacaagtgttgggcatttttcttctgcacaaacctaaaaaaacaacaaaaaaatttcatttacttaacgacattaaacataattttatattcaatgtattcatttaatgaaataatttagatatatatgttgaagcattaatgcattttatctcaatacagaagttaaacagaaaaggagaaagcacaaggcatccttgagggaatgatttagataatatggaaagatggttaatatgtcaagcacttccatgggtgttaagtacacagctttcttttcagtccaatattctagaaaaatgtctttggtaaaaatatttatcattttgtaaaaagagttttgtcttgtaaaatccatatgtttcaaggtacaagaaactaaataggcagactcaaccaggaaatcctcagggaggttcagagttgctgtgccaaagaagaaatactttaatctcaaggtgtttagggtttctcaccaaagcagtcagctgctgaagcctcaacacgtgtgatacagtaaaaggacttcattggagggctgataaaacgcttgagccctgcatctccaatgttcagctaaagctctcaaggtccttggccagtcatttacaggctggtacaaagtatactgactttcttagagtttgcttgatatggtattacagtatctgaatccacaaatgtttgggagaatctaatgggccaaatgcaccttctttgtctgttccctgagtcactgctgaggatgttccttaacctcctccaaggataattgaacagtgaagaactggaaaagggccatgttagtctcagctatcatgaaaggacagccgtgacgaaagtttagttccccttttttaaattttcctcccttattcttccatcttattttcacaaactgcctagagcatttgataaaacaagagtattaccttttaaaatatatataaattttcaactttcagatgactgtaactgacttttatgcttattcatcatgcagacaatatcactggataagcccaagatatgaagacatgcaagactctgcagaaacttaacatagtaccttggaagttattttataaaatcattcaaagcagttgttttcatgcattagccttttactcataaaagagacaccaggaagaaaaaagaaaaagttggttgatatttcaaaataacttgtatttcacttatatttcaagatataattacttgtatttcaaaatatagtaatttttcacactattttataaaaccatataactttacaatttcataatctgttactcttcagcaaaaatttttagtttgaggtgaattctttaatcttagcttgaagaatgacattctgatagaattcttatcttcttaaaggatatttttttgaaagaatgattttttaaaacctagtttttgaaaaggaagacattctttggagtataggccatgcaattttatagtaaagcaagaccagcttaattttggaattaccaggttaaattatgagccacaaagagttatgttttataacaaaacttttttagcatgctatttttgccataatgaatagctaaaaaggacaatatgtgttccaagtattgcctcattttgaaatgctgtgctctccacgggcaccaacagcagcagcagtgatatttgcataatgaggaagcacataatgatggaaaatcactctcaacagttgaagtgagagaataattaaagcatcaatttagtccacatcctgcaggttgctgaaagcccatagagggaaactttgtgccactcaacaggaagaaaacagacttcacagcagtttatgactcacagaaagccgtatatttgatttcttaaaaacagaagatatttgggacattcctgtgctttgccttgatcatgacagcagaggcttggagctcaaggggcttctgtggtcttctggccacactgtgcttctcacctgccccagcactaagcaaattactcatcacatttcagctgccaatctcaaatgtttctacttcccttatcagggaatttatgctttttattttttaaaatccccaaataagctgatagttttttccttatattttctttcttacccctcatgtaggggggaaaaaaaaccttttgtttacattttcctaatggtatgttatcagaatattaaaatgaaagtcattttaataaaaattttaaatcacttttagacctcattaatgcaaatacacattggttttttagtgcaaaccatcattttcacaactaagatgtatttccattaactataatgatgactcttctttttaaacacatgcttttaaaatgattaagaatttctccacatctatttagaaatttaaatagggatagacttaacagcatattttattaaatatttttgtcattcattaaatattatccatcaagataatgaaagtgttcttactcttgtagctgtgtatgtgataattgggttggtagtattttttcgctccactggtacccagagataaatctgcacttactgacactgagatgtgggccagggagaggtgtttgtttagctttctagaagcttgctctttccatttactgatgtgctatctgctccctgaatctaacgtttgaaaaaagctgcttatataaaaagctcttccagagaattttacgtgcttattcccttatgttgcagacttctctgatttttccccagtgatttaaccaggttattttacttatattactattgagtcacttcttcagttcacctaatttcctgttgtatatatattactgataaattcatataactccttcttgtaactgcttgtattttcagcttgaaaagtcttttttccaagactcaatgtgacaaaataaataaatacataaaattagttcggaattaagtttaaacagaaggcaaagtagttgtgatttctttcttgttcttaagaggaaattactaagtatataaaattcaaaataattttcttttacaatttgattgagctataaaactttttatacaaagtttgtccagaggtgatttaaaaatagctacatacttgtttaagaaatgtatgatgggaaggaaagagtctgggaaggaaagagtcaaaaaagaaaaaagaatgaagggagcagagagaagatgaagagaatgttaaaaggcaaacacaaataactttcagaatcaaaaaatatattataccctcttcttcctcagggactctgcacatgtgatttctcctgcttggaaaatttctaccctctgccctgcttctgtttcttatccagggatcttattttggtcattcctattcaaccttcaaagtcagcttagatatgaattcctcgaggcagattttggtttatgtgtccctagaatatttgcatggagaatcccatgaacagaggagcctggcgggctacagtccacatggtcacaatgagttggacacaactgagcggctaacagtttcacttccattgcaaagtcaccagattctaggtaatcacaccccgaagtctaggccccacggggctaaaggttctatctactttgataatcactgtatttcagcaccttatccagtgctcagtacatatctggtagtgaataaatgaatgacttggaaactgacaggtagaggataaagtagggaaacggagcagaaaaagactcaagactcagaggacagttactctaaacaagtaattttattcactgtcatttgagcaattgtaacttacatcactactatattactccttcatatatgcataaaaataaaaatttagatgcaaaattcacataggaagtgacagtaaaggattctgaagagattccccccttaagatagactctagagaaatttccctccagtgtcatcattcagcgtaacatttgcttacctttgctattcgactagctgtttctttgcaaaactgagttgggctgtcaaaatgctggattaagtgaggcaataagcaaaggatgttaagaggaaagcctatcaaaaaaaaaaaaagcaaacaataaccaattttattgcacattactttaaaaattaaaggtttttattttgtttgttttttcattggttcacagaaaccattttctttttatttcctggggtatttgatcttctaaaaaaaaaaaatgtgtttgtttttttgcttttaccaaaaaatttatgctacctcacatattaagaaaactctgtggaaaagcagaaattagtagatttcaaaacaaatgattagtttacatttcactacattaaaaaagaaaaaaaaaaacagttggtgcaattctattcacatcacctgacaaccgggaaggatccaccaacgtgtgtttggagacagaaatgagtttactcaggaggtgcactgtcatttcctgtgtggatatcgaggtaaaacccttcaggaagagctgctggaggcctgggaagttattccacttcagtttgctttgtacgttttcaatcttctctcgactctctgatttatccaaaggcaggtggatcagcagtttgttgaggagcctgagagccaggaggtattcatattcataatctgattctaacaaagaggccgctatccaaaaaatggtggccatcaagttggcgggctcagtagggggctgcacatcgtacgccgccttctctcgcagggaggaaaggctacgagtcctcgctaagctgctgctgtggttgatccgtccgtccgttatatccagtgtgttactccgccggcggtcccctctccggtcaccaattaaacttaacctcaaagagttacttcttgtagtactgttgtatcccagataactgctactgttaatgggacttgtgcttagattgagttgtccagtgcttttcctgttagctgcatacttgtttcccattataggatcatggtatgaggttcttgaaagaaaaaaaaagaaaaaaagatgaatccaggcacaactgcttcttttgctacattaactgaactcttaaaacaactgaaaaacaataactgttaccaaggaaagtcatttttaaagtatatctgacttaatacctgaaactaacacaacactgtaaatcaactctactccaataaaattaaaatatttttttaaaaaagcttatctgactttgctgaaaccaatttcagttctttcttctctattaataaaaaatgtacaacagtatcttttctactgtaactgattatttcccctgagttggatgaggtttgaagtgaaaatgctgctatagttactgctgataattttcaagtctgggatttggtgaacatcatatccaaagcccaggcctcgtttgtctcatctgcagactcaacagtcctgatgtccctatttctgtcaattcacactctttccaaaagaaccaagctcaaaaatttaattttgatttctcgttctccctcacatctagttatcattgattaaaaaataattacagaatattttctacatgtgccagtggtaggcaaaatgctaggaatactgaagtccatgaaaattatagcctgctagttgctgttattaaaatattaagagaatactgtgagaatccaaaggatagaatgcttaacactctcctggtcgcagttagaaatgcttaactaggagaggggtactgagatgggacttgaaggataaatcaatttgggatttataaagaggagaaagtttgaagagaggctggtccaggcagaaggaccaataggtggcaagtgggagtcctgaggagcctgacctgctcgggggacaatgggttgttgagtgtgctgggaacagagcctgttactggggctgaagcctagaagcacagcatgaaagtctctcgccagatgaaagaggaacagtattgccacttactagccctgagacctttcacccatcctcactgtctaaggctcattttcccactggcaattcatctgaatttgcgggtattcctctcactaccaatattagaacaatataatattatgcctatttagctactgaagttttgtatacaaatccaccggttgcctggcttatcaattcttactgagaaagggcagacagaagatcataatgcttcatggtttcagctaaagtatcaattgcagattccaacgtgagaagcagctcaatcacaaatccctagaaaaaaggggcagattttaattaattatgttctgaaagaagaaactgtaatgcacatcctgatgagattttaaaatagaacaagttccacattaatattacaaaataattaaactcttgagcaacatgatcttgcggatggatgaaaatgtagcaaactaatggtataacttgcttataatggcaacacaacccacccaaaattgctggggccagaaatctcgaagacatccttatttctttctctcacatctaaactgaatccatcagcaagtcttgaaaacactactttaaaaatacatcctatatctgacttctctacttccagagcttcctttaatccaactatcaccgttttagcctgggctcttacaaatagcctcttaactgacctcttttgccttcctgaggatgccacaaagccacccacagtgtgaatttttaaaaaagcaaatcacacccatcctcctccttttaaaactatgtgtagtttcccatcaattcagagtaaaaatcccacctctcgccagaacctccccaggcctcatgtgatctgggcctgctgcctgcctgcctctggagtccccatcccatacacggtagccactctggactgtttgcttttcctctgaagagcccactgcttctgcctcagggcctttgcacttattagtcctatttctctctgctctctgtcccagatcattacagggctcacttactcatttacacatgtgttcagaactcatcttctaggggattatatacaaaaaaacaaaaaaataccccctccccatcattgtttaaactgtcaccctaccttattattttcacagcatttaccattaagtaaaattgtattatactttattgatggattaaaaggtttgtttccccagtgaaatgtgagctccatgctaagaactctgtggtgtccactagtatatcctcagtatctaaaacagccttaaataacatcatgggtctatacagacctatgttaagttccctactgcagtatttcatgtaatttatcttaaaaaatgaaattcagtgttttactttacatctaactttaaattcctcttttaccttgtagtcatcacaacatatccaggtgtgtgtgcataaagctgtttttataggcaccacttaattcaatctttataggtaccagctaattcaattaaacatgaattatctaactttgtttttagttctccgcttcttagcatctgacatcataattctctatgacattaaccttgtaaacacctgccgtgatttacatttggaaacaggtccctgacaacgaggaactgctcaacacctgctgaaagaagcggaagactacctgtgcgtcttctcctggatcccctacagtctctacaagtctggagagaacgtcagaaagtgtagctgcagagagaggctgctttagggccctgaaaatctgaaaggatctcccagcatagtgtcgagaagaacaagaaagtgctgtctgcagagcgacctcgctgaggtgatgttccaagtgagttccttctgtgaaaacaaaggacacgagtaagtgcttcctgtttttcagggtatatatagggatgatgaccagaagctaggaaccatattaaattcagtgccagcatagtacctggcaaacggggcattaacatttgctaacattttccaagtcaatgcttttccttttcatacaattctatttgcactttagatgactcttcatcataatctccagggaagtaatccttgagaacaaggtctctcagcgtcaccactgttgtcattttggcaacgtaaaactctgttgtgagggctgtcctgtgctgtgtagttgtgtaatggcatctccagcctcttgacaacttgacacccgtagcaactaatcactgacttcccaccccctaattgcaagaaaagtgtcccaacaagaatcaccccctagctaagaaccaccattttagacatgttttactctgattttcaggatgtgttcaattttcaatcacagaagcccaaaccagtacagtttgtcatctctatatatgttccttcaaaataactgtttcatgatgaacaatcatgttataattttattatactatcatatgtcaaagaaagaacgtcaaagtggcattctttttttcaaagatctatttggtatataccatttttaaagtctttattgaatttgttacagtattgcttctgtttttatgctttgcttttttggccactaggcatgtggaatcttagctccctgaccagggatcaaacccacatctccagcattggaaggcaaagtcttaatcactggaccacctgggaagtccccaaagtagcagtcttattttcaagtaataatttttcttcaaccaaaacaaatctgttaccactaataagttaaaaaagaaaacctgtctaagacttttgaatttagacatgtcaactgtcaattttttgctgaacatcatcagaagttttgacatcacagtaaaagatctacttgaaagtaaatattatttgaaacatttattaaaagatacctgagcttgactgcttaaaaacagaaaccacatgtttcaaaaatgttgtcaactgctcagcactctttatgctaggattcttggcagaaacatcctcatggttccaaaggggccctctttttctgaaaacagagaacagatgtgattcccttggtttttaatttgatattaagttttactcacactcacttaaaatgtgcttttgcagttagaaaggatagtagttgagtaaatcaaacagcatgtcatacagtctactgctactgtttatatactacctggatttgcaatgatctagagcaagtagccagagaaggcaatggcaccccactccagtactcttgcctggaaaatcccatggacggaggagcctggtaggctgcagtccacggggtcgggaagagtcagacacgactgagcaacttcacttttacttttcgctttcatgcattggagaaagaaatggcaacccactccagagttcttgcctggagaatcccacggatgggggagcctggtgggctgccgtctatggggttgcacagagttggacacgactgaagcgacttagcagcagcagtagagcaagtagcagaagatccaagttacatataatttcaaaatgttccatcgttatagtcaaatgctctcagaggtagtaggaaaagatggcaaattttgccaagtgagaagagtactggttactgcttagatattaaaggtcaaaatttatagaggtgacacattatttagattgtaaggcaaagaaaataatttataagctaaaactacaggaaaagtttaggacagaataatatccttcaattctttctttaaaaatatctgtgcatttaccagcttggttattcaggtttcagccctttattagcacaggccaaggtgccctgaaaaaaaatgtggtcacactgcctctagttcctgacacctctaattcatcaagtactatgagactgattttctcaacatatttatttaattgggccctcctccacactcctcattctagctcaaaattttcaataatgtctcctttcttgaaagatatgtaacctctggcctgggcttcctggttctggttctccagtttgaattctcccaagctttcttgtctaggaacccctcaacattacattcaagctggattactcagcagcctgagtgagaaacaattataccttgtttttcacatctgtgattttgctcttgctgtggtatgccagccccttcctccccaactatgtttcttccttacttagagtgttttgccaagagtggaccgtaagtaaatatttgatgattgactggtaatgcagctaatgaaggcagaatatacattcagataatactacactctctttgggcacttaatcattcagacatgattaaggccttcctcacatgtaatcttgtgtgagcaaaagaagaaagcctggttgcatcaaattttctgaatattgcacaagacaaacctgtcttttccaaatcaatgacactttggaaaacaaaaatagggttcgctgaagctgacaaatgaaacgacgacttaacagaggtttatggctgggatgggaagagccgcaaatgttaccttgaggtaatgaattccatgagggttttgacttttccatcctgctctactgagatgtcaacctcgttgaggatagtggtgtgcagatgggaaatggcagcgctgttatttcctaagctgatactagaggaggtagaacttgagctgagccctgagtcggtcatgggggagggctggtaatcaggtataaaatcactaacacctgctgaaagagaccatgggtgtgaatacccagatgtgaaaccatctcccacaatatttaaagattaagctatgggcccttacagattatactggagcctcacaagcaccagagtacatcaactgagtttttgagcaaacactgttttcagagcctattaaaacttaatggttcagattaactatgctagcctgtgctgccatctgctgaacaaagttggaactggcagtttcctgacactggcatatttcctcaacatgtgttaagaaaataatttctacagtgttagctgatttttaatttcttacgttaaggggtccatactttctgcttcactttacttaagtcaagacaattttaaagtctgtgtgtaatatttatattatgccaattattaaataattctaaaggttatcactaatgcccatatttataaaatggcaagaggagccttaaaaacaaataacaaatacaaactatggaattctgaatagaaatgcttaacttaaaaaaggcagtaaactttattccattcatcttttaatcatagttttaaaaaggcaactaagtttactaatgattgttttctcactaactacagggctttgagtaagctacagggcttgcagtaagtaactttaaaatggattaaccctgtatctggcgttatatgattaggaaaaaaagtagccttatttcaatttttaaacccaattattttctgggtcatttattataaacctgatggtactgatgaatgaaataaatgaattagggctattaggaaaaaagaaaatacaatttgaaaagtaaaacaaattcatatcaacagtgaaataaattctacattaaagtctcattaatttggacctctctacttaaaaatacataatttggaacttactagacttcgagatgtgtaacattgtaaatgcaattaatataactgaatgaataaaaaattttaaatgtcttccttcgtcaatttttcagctcttgaaaggaggaggagtctaatacaagtttaccattttttttttcataaccagtgctcaaattaagccactcaacatttttatgacaaagatccttaaaggtaatagagattcaaataaagtttaattccttcttttatgaattaataatgtcactggtacctaaaataataaaactacattaaaaagtactctctagtatctcaacttcagttgactttctctaatgcaagattaacaaagtacggttctattttcaaaccacttttaaagcaaatacctgtgaaagtataatctaagtgtgcaatttgtttgacggtaagcaccctgggctcattaaactccttgttcctgagaaggacagaagcaacagttcggatgttactgttggatcccattactattaacaagtgcagaagcaggcgtttgcaatgttcatacacctcagggtggcagtggtcaaaccctaaaaagagtagtagacaattatcatcaggaaagggaaatgatgagtagtagtcttgctaccaaatgtatattttaaaaagaaaagcacaaattaaatattttgtgaaagatgacatactacatcaaattttttttattgccctagagttcgttcacacttttacaatatcccatggtcctactggactagggcgagtcaagacaagtttccaatttgttttatgtctaaaatttagtgatctcttagaaaccattactctgttacttaacactagatggacacgaacttctaaaggcaagcattttttgtgcctggaacacaacaagaaagtcagtagatgtttgattactgaaggaaggaagtaatatataatatgatatgtgtacatatcaggaaaatttaggagaagatggctattttgacttggttcaggcaaacaatcttacaagcatgaaaagtattgctgagatgtgatggactccacatatttgttacagagggcacagtggagctttaactgtaataattagactgtctacaatctaattattttgggaaacagtcagtacccatttcaattttccatttactctgaaagttcccagtcctaaaggtaaattaattttactcttgctaccattacagactctttcctgctggaaggtatgtgtatttttgtgtgcggagagactgtatgaaaggaacaggaatgggtataacaggcttgtccgtggttaaaagagaggctaggaataacacccctctagaccatgagaatcccagtaaaaagtgtcatggaaacaacatgcaaaaataagaacagaaatacgtagaaactttcttaaaaccataccacttttcccactgaggaaaactatgaaggttcctcaaaaaaataaaaatagatctcctatatgatccagcaattccactcctggggggtatacatccaaagaaaacaaaacactatggacgatatacacacccctgtgttcacagcggcattattcacaaccgccattaaaaaagagtggaataatgccatttgcagcaacatggatgaacctggagggtattatgcttagtgaactaagccagacagaaaaagacaagtactgtgtgttatcacctatatgtgaaatctaaaaaataaaacaaactattgaatatagcaaaacagaagctgactaatcgatacaaagaacataccagtagttagtagtgggaagagggatggttggggaggagtggcaagataggggtggggaattaagagatacaaactactgtgtagaaaatcagtaagttacaagggtatattgtacagcacagggactctagctgatattttataataactataaatggtgtagaatctataaacgttttgagtcattatttgtacgttatttgaaactcacattttaaatcaactacacctcaataaagataaatgaataaaatgcaacctataaaaaacaaacataccatatactgcctttcagggatcacagaaatacacaatgaaagaaatagcaccaaatatttattacctataaaaattgcatgaagaagaagatggaggtagcttccccattccaccttcacactgtgatcaatgataagatccgtcaaaaggatcacggctatgttacacctatgacaaacaagagcgttattaatgttccactagagcaaacctagagaaaatcttaagcaaattactctaagattttaatattgtattttatggaaaaatacaatttcttaaggaaaaaaagaagaaaagaagtacagctgaggaaaccattgagtgatagttttacaaacagcctagctgctaagggctcctcccagtcaagagctatgtttccttcaccttcaaccccgagacctggtgtactgcttgccacgtagtcggtgttcggtacacaattggtacaataatacattttgaaagaatgcagtcactgttctactgtgatttttgctaagcaggaaatcagcttaactcaaaataagagtgcctactactgtaaaatagtatttttcagatgtaataactgggtcccagaaaggtcaagtaactatgccagacacccagaaaagcagcagcagcagaattagatttaataccatttattgtaaacagtgagaagtctgagtttttagatcgcttaaaatctaaatacacggatagaatctgtggcagtatcaaaggaaagaaggttgcttgtgttctgtgttgtcagatagcatagagacagctgaaagtattaagcagcggattggctcatatgaaataggaatgacgctgtggtccacctgtgaagaggtaatccaggtgatgacgtttcaggcaagtaatccaccagtggtgaccagcagcctccagctggtgggaagggtagtggctctccttgattatgctccatcactttcagtcgccaattagaataaagtggcattgagtcacctatcaaaataaaatgatctcattgtctacaccatctactttctgccaatataagcaaactctagtaagacaccaactatttatagcactggaaagtgataaaaaagaaaatttcccactatttcgacaaatgtgtgctaggtagacctgggtaccaatattatcagattaagcaaatcagagagagaaaaagatatatcaattcaaattcctttattttaaatcaaagcaaaactacatgagcacctcatcatgatttcacaactgatgtccaagctatgagaccacagtataggtaaagctgccttgtatcaagggccttctgttaagttactcagttcaaatttctggagatagggccgatataaacccatcttcacaggaaatctgctctactgcagtggggctgcagggtgtagtaaaaaaggccatcaagacatgtgagttctgtgtgacgtgggtaagtcacttaacctctctggacctcagttccatcatgtgcaaaatgaggagattggaccagatcatcttcagggtcccttacggtctgaaggcttgtgcttccatttcaccctatcttagtgttaaaatgagactcggacagagtgctcattttgcaactgcaagggagaatgttcaatacaacctgagtcccaccaaagatcaaacctgtttaaaaaagcagcctgctgcctatgtgtctgttctgtgattctttctatgatgcttcttgagaaccaattcttatgttccttttgatcaacctacagggaacctgtgcttttaaaatgtatttccccacttgatgttgtttctttaagtcaagacatttcagattatgttggaacaccactagtggcagttaaatactcttcttaagaacaatttactggaagaatactggaacaatttactggaagaattattaacattactataatgatagtatacctgacaatcatagttatttaaaaaaaaaaacacatttggaatgtattacttttttcttcttcataagatcctccagagctgctactgtatcgagattctagtctgtgatgttggcgatttaaatgactgtttagtccactgtagatgtctagatgcacgtagctgtgggaatgaccactgaagttagtcacagttcatggtaaaatggtatttgtactttatgtttcactttctatgcttaaaaattacatcacacaaattactaactaaagtttactgtgatatattttaatttccacattacaattcaaaagctttgaagtcagttatttctgcctgaattttttcttaaactgttgtgataataactttctagggaaacctattccatataaaacaggcaagagtgaaatatccatttagaaaagtttaaaaaaaatgtagcaacacaaaaaatgactcaccatactccacctattcatccattggtgcatattaaaaaatctagcatgcaagtgtctttaatgtgaaaaatttccagcatggaaatatatttcttcactagaatattaacaccattccaatagcagaaattatcgtttattctgatgataatcaggatatgtcaaactgaaagattaatgaagaacagagaagtacttacctctcttcaatacactcttttatgggcttattatcaggattgccatccgtgggagcaaccattgtattgctactagaagtagttcctgtcatcagaaataaaacggtatcaatgaatgtaaagcttaggacagctcaataagaacaaaagatttcatactacagatgtcaaaactccactaaaatgagaggaaaagtgaaagttgcttagtcgtgtccactctttgcaaccccatgaactatacaagtccatggaattctccaggccagaatactggagtgggtagcctttcccttctccaggggatcttcccaaccaagggatcgaacccaggtctccagcattgcaggcagattctttaccagctgagccacaagggaagcccaaatgagacggtgatttttaaaaaggtatgtactcttaatgaccaacagagtaaggagtcaacagcaacaaagttagggatgctggaaaacaaatggacaagaagtaattaaggttaaaggagctgaatccagagctgctggtggaggaaacaaaaaacttctatatctatactgttaaaacctccaaaagacttaggaattagtggcaacagagtacctctggaagcaggggttgaaccagatgctaagaatggcaagaatggttgaaagtctatttcagaagtagctgggccccaagagctacacctctacttcttataactgggtgactgtctctgctcacttgaagtcttctctgatgacaataaatcagaggatttctagactagggcacaccatacacaggtgaaggaggaagtactttactgaggataagggaaataagtggaaatatacacacatgcttaacttgagaagacatatctccctgcaaccttcttataccactgggctatcagaaggctggaagactgtaagtgtgtgtatctatggattatacgtatcgagtacacacacattcacacagccctacatcttctattctaggcaaaggattggaagaattttctctggggaatctgattagtacaagagaaaagaccaatggacacttacatcgatgaaatcattgtgtaaaaaaggacatcaacaagttccatatatacctatagaccatccaatcaactcttcaatatgccactgtttatgaaaagacaaatctagaattggtaggcttttgaagaaagcttttactaagacaaatcaaaacaaagaaacagcaatataaagaaaataggaactttcccaggtagaaagctttataaaatatagaagaagatggtccaactgtgaaacacgaaccagatgctcctaaaaagtttttaattaaaaaactctttttggaattaaaaacattttagcagatataaaaaattcaatagaagcattattagaaatctcctagaaaagtataacaaaaagatgaaaccagatgacaaaagtaaattataaaacatagtatgaaaaatctctaattatacaatgttattaacatcacaaaagcatttaatataaactgagtgacaaagaatttcatataaatttaatctacaacagtccatatattatatcaattttcaatggatgtagtttcaactcaaaatattatgataatatagatatacataaaagtaaatacactgacatgattgaatactatgtataatatatgcttaaataattataatatgaaattacacagtaatttcaataagtgagcaattccaatatttacatattaattatatccatttataagagcacctgttgtaaatggacaaaatggatatattccagttctgaataggtatataaacgttccctttatcacattacaaatccttacattgtcaaacctttctactcatatgaggatttacaaagttctgtcaagttaattacatctatgacttaacatttgcatgttttctctaggacgtttaaagcaaacacctgctaaaatgaacagttgtggaaagcttcttttttcatacaaagtaatcatttttaaatgacttctcacctgaggtgacagaagggattttatagctggaagtgatgcggtaataaggggggttatccatgtgagtgactcctgaactgacggggtcagtcagctgtagttcactcaccagctcttcaagcaactgcattgttttgtctctacctaaatatacaataactttcttcacctgtcacaaaaaaaatcgtttggaaaagaaaaagcacaatttttatcacacaaacttgtcaaattttatcagagtaagttcagctttaagtagtagatgaataagcacaatttaaatttgaatagacactgatcagcaattagacattaatcagctttataagtactcttcccttcagccctcaatattgtatcaaattaggatgacctagatatattgcttaggcaatggcaccccactccattattcttgcctggaaaatcccatggacggaggagcctggtgggctgcagtccatgaggtcgcgaagagtcggacacgactgaacgacttcactttcacttttcactttcatgcattggagaaggaaatggcaacccactccactggaaaatcccagggatgggggagcctggtgggctgcagtctctggggtcgcacagagtcggacatgactgaagcgacttagcagcagcagcagcagatatattgcttaatggtgtccataaagtcatcactccctttatttatttttagaaaagcaaaagataattgcctttttataaatcagtttctttttcaatggaaaatgaagtgaaagtcacttagtcatgcccaactctttgtgacccccattgactatatagtccatgttatcagggttgatctcccttaagattgactggtttgatccgtcttacttgatcaatcatacttgatcaaagagtatgtttttgtagtattattgaaataggctgatcaattagtaagcaatcattcttttttctccctatttaaaccttagtacttaaaatgtggtcctcatagaacacgcattataatctgaagctttcggggatacagaatctctgaccctacccccaactccagaatgagaatgagaacaagatccccagctgattcacgctgcattcagatgtgtgagaagctctgttttacatcacccccggacatgctttaaattttaaaacatgctttatcacatcacaccagcaatctgttaattgttctgataattggcctcccacacagctctagatctatccaatctgctctacttgctaattctttgttctcaagttcagtctcctctgatcacatcaggcacatttctgcctctgtgtctttgctctgactcaggacctctgagatgatactcctgactaatcctggcaagtcttcaagccccaccccccactccagctgcaaggcctgtcaggaagctttcctggacttttcatcaagagctctgggttggaattccagctcttcggagatagacctaaatagctatgtgactttgagctatgtcactctttctcgctaacttactttattcattgtaaaactgcagtcatcttaccaaattcacagatttcttccagaaattaagtaatgtaaatgaagtacttgtactatgcctggcttgtaagtagtgcttaagaagtgataattaagaaattattattatcatcatgaaaaacagctcttttaaaatttctggcaaatggcaattccctgaatttcatcttgaaaagtgaaagtgttagtcactcagttgtgtccaactctttgtgacctcatgggctgtagcccaccaggctcctctgtccatagaattctccagacaggaatactggagtggattgtcacgcccttctccaggggatcttcccgacccgggcttgaacctgggtctctcgcactgcaggcagattctttaccatctgagctaccagggaagcccaggaatttcatctcggcttcttggaattacaacttcatgcctgtttctagtgccaaccccaattcagtcatttattcatccaattaaggggaacttcctgtgtgccaggcgctagtctaggctctgacaagaaggcaatgaactaaataaacaaagattcctgctctctcttttttttttctttttgctgcagtgcatgtcttacaggatcttagttccctgaccagggattgaacccaggccatggcagtgaaagcaccaagttcgaaccactggattgccagggaattctcagattcctgctcttaagagctcagaatctcctggactaactgaggcaaaagtaatgaggcaaagaaataaaatatacagtgagttcaatgataggtgttaggaaaaccaatgaaacagggcaagaaaaagaagagtgtatatgtggcggcagggcatttgcagatttgaactagatgaccggcaaaggtatcagtgagaacagccatttgaggaaacatcttaagactgtgcagaaatgagcaactgactgtttggagagagaggaaagcaaatggcaaggtccctgggtgggaaccctgagtgagagccgggcagcagagggttcagcatggctcaagggcagggggcttgagggggactgttaggacatgtggtcagatagctaatgtggggatcatgttttgtactgcacacccacctttctccaggtgcttctcaatgcagattactgtgacatgccttcaggacaaagctttcagtaatcaggttaacacaggagatgatgggtaaagcaaggctactcagtggttcatttcaaggaggatccataagagcttttagcgcaacactgtagagctagttttccgtggaacatactttaaggagatgctaccctgtgtctaacagttatatctacatatacacacatgtctgtgtgcatgtgtgtatattcagtttaacctttgtgtttgatagttccatattattctcttgagcagatttaagtactgttctttcttcagaagataaagactgtacattattcactgtatatctcttatcatgattttccctgcttccagaagcctttagggcatgattctataggtactgagctctcacttctcatcatgctctaatatcccaatgtcagctgctgataggaaaaagtactaacatctctccactttcatcttactttctgtccaatattatctctaatcctctcagacagtggtggctccaaagttatccactctcaggactctgcagttttcctccgtagcccttaccatgactgtacatcactaacctagtgatttagtcattaaataaattaggtgtaggttcaaagaataaaatctgtagcattcatcagattataatgcccagaacatagaagagcacttggcctgtagtaaagccaggtaatatttattaagtgaatcaatgagtgaatccatgtgctatttcctgattggcctcctcctggcccctgctttgcctctgctgttctactgctgcccagattctgacatcacaagacactgggtaagtatacatagacatatatatatatatatgaatgtgaatgaacttgaacacatacgtaaggcaagaggcttggttcactatttactccacaaatgctgatcagaaagtgcaatattattttcaggtttttcggccagccatctgcgagtgtggtccacacattctccacctccgaccaggccagctcatcaccatactagatataggaaatacagcacacacttcagcagcacttcagtaacaaccatccattcaatactaaactcataacattgtgaaatattagaaaataatgctttgacagacagctttaatcttctccacattgtagagaaataatcatttctttcaacaaatctaaatacaaatatcattaatcacacatgattttagctccactccccaaaggatattttatatctgatatgaagcttttttttttaaagaaaggaatttatttataacacatacttgtttggattatctaatctctttttctgtttctaacctgtttactcctcctaacttggtaattctgtgcaggaaccacaaatacaaaacctcttacctttgctgtcatgtacatcagattgttcaaaaccatggcagtagcttgcggggatccccagccttctcctcgtaaccagcgcctgctagtcaccatcagttctcggtcttttaaggagtcatcttcatcttcatcgtgtcgtcttgctgtgggcaacggtttcaaatccaccagctcgatgttgttcatccacggtaacaggtagtgcagcattacctgtctcccagcagggtgagctgtctgaattctctggcttatctctgtagttaaggacaagtcaaagagggaacaactgatgtaactgtgctttcctttgatttgtaatgaatttaaatgtaactctttaattctgaaaaaacaacaagccagattttattcactacatttaagaattatgagcactgtttctccttttaataaatctgaccttgatgacatcataaagaaaaggaaacagcgaacacacaccacatccttaacttttatataaaatatctctggtagttaagaaaaatgtttgcacactattggtgagtctgtaaatggtgtaactgctatgaaaatagtgtaatggctcctcaaaaaaattaaaactagaactaccatgagttagaaatcccactgctgactatatatctaaacgaactgaaagcagggtcctgaagacctagttcacagcagcactatttataatggccaagaagtggaaccaatccaaatgtccattgctagacaaatggataaaccaaatgtgttttgacacacacagaatactctgcagctttacaaagaatggaaatcctgttacttgctacaacatcaaaggatcaccttggaggacattatgctaagtgaaaatagctaatcataaaaccacaaatactgtaaacttccacttttataaggtatctaatataatcaagttcagagaaatagcacaatggtagttaacaggggctaggggaagttcaggaaagggggagtttactgtttagtaggtgtaagtttcacttctgtaggatgaaaaatcgctagatatctgtttcacaacaatataaatacactaacactactgaactgtatagttaaaacgattaatgtggtaaattttactatatgtgcttcttaacaaataaaaaaagtaagataaagacaatctttatacatggattaatttaaagtgacccatgaaaaacctcacatatttaggttctatctaggggagactcctatgaagtgcttattatttttacattcatctcatatagtgctcatgataaactttgtgaggtggacagttcgagtaacgtgtgcaaggtcagaaaatgatcaagtggcagaggattcaaatacaaggttgattccaaagcccatgagtttttatatactgtttactctccataaatcactttaagtaaaagccttctctttcctcaagtccccctttgcccactacatcttacacttacaacttcagaactgggtctgaattccagttctaccacatatacacagattgacctaggaccaactatcaacctttgatcctcaccttattctctaagaaggtaacaaaagtagttgtgtcatggagttactgtgcaaactcaacacagtgccaacaatctgctcagtccagtgccttgcacatattatgctcagttccaactttttagaagaaccccttctttaaagtaattaatttaattggagaataattactttacaatattgtggcggtttttgccatacatcgacatgaatcagccacgggtgcacacgtgtcccccatcttgaacctccctcccacctccctccccaccccatccctctgggttgtcccagagcactggctttgactgccctgcttcaagcattgaacttgcactggtcatctgtttcacatatggtaatatacatgtttcaatgctattctctcaaatcatcccaccctcgccttctcccacagagtccaaaagtctgtcctttacatctgtgtctcttttgctgccttgcatataggatcattgttaccgtctaaaggaaccccttctgtgaacaggtcaatatcattaccacaagtatgaaatacgagacctggagttctgaatgaagagatcctggctgagggattttaagtgtgtatgggagccaaagctatggcagcacccactgccatcctgaccaagtccacgacctctaagataccaaggactcctctcttctgtgctaaagcctccaggaaaagcccaggagcctccaagaaaagcctagcagcaggagaattagtggagacagcggttagcttcccaggtaacactagtggtaaagaacccacctgccaaggcaggagacttaagagactcaggttcgatccctgagtcagggaagatcccctggagaaggacatgggaacccactccagtattcttgcctagaaaatttcatggactggtgggctacagtctgtagggctgcaaagagtcagacacaactgaagtgacttagcacgcatgtggttactactttgcactgatgaccatccatatccattctgaaagggatgtcgggactgcagaagttgggaagaaggaagaggcatgactgctgctatttaccagtgcagacctaacatgtgtgctgctttaaacactgaatgttaggagaatttgaatttaagttgttttttcccccaatcagatcaattaggggtgggactcaaactatctccactgctaaaataggcactgtggaaaagatgggccaagaaggtggaggcctctgtgccttgaacctgaatgaaaggttcagagccctggtatctcctgcataccaattctggtgcatttgcagcactaagattagaacgagatcttactgaagatgaagagcagaaaaactagctaagagtcttttgtattatcactaataaaactattcagttaaaggatttataagcactatggaggcatctgcaatagagtgttcattgaccaaaaggctcaagctggatgagctccctaattatcttaaatctgagtcctgggaaacccatatatatacatataggacatcttgcttgacacatagcccatgctttagaaactcaaggcaggaatgtttgttggacccaaggaaaggaaactggaccaggaagcaaggcgggttcctagctataggtctgcttaaggcagtacagtatgttcccctatgatgagaagtcttatagaaagaaacctgtacccttatccctgcccatttatattattaaaaatagaccaatatacaagataaaccacacactagaagattcaggaaattttatgtctactaaaggaatattttcaaattgcctgtgaagccccctcctactttttttttttgttgttggctagtgtgaggtggagaagagaggtcaagtttagaatccctttagagatctttaataagcaatctcagtatcaaggtaggtcagtattaaagagttcatattaaaggaaaaaaacctctcttatataaagacaggttttgttttaattcaacctcaaatttcatagatttacacttcctagaagactttatttttgggggctccaaaatcactgcagatggtgactgcagccatgaaattaaaagacgcttactccttggaaggaaaattatgaccaacctagatagcatattgaaaagcagagacatttttttgcccacaaaggtccgtctagtcaaggctatggttttctcagtggtcatgtatggatgtgagacttggactgtgaagaaggctgagcaccgaaaaattgatgcttttgaagtatggtgttggagaagactcttgagagtcccttggactgcaaggagatccaaccagtccattctgaaggagatcagccctgggatttctttggaaggaatgatgctaaagctgaaactccagtactttggccacctcatgtgaagagctgactcattggaaaagaccctgatgctgggagggattgggggcaggaagagaaggagacgacaagaggatgagatggctggatggcatcaccgactcgacggacatgagtctgagtgaactccaggagttggtgatggacagggaggcctggtgtgctgcgattcatggggtcacaaagagtcggacacaactgagtgactgaactgaactgaaaagtagttttttcaaaatggttgctgaaaaaaaaaactactagccagttgaacaaccatacctgagaatatggcgagagttagctcaggatacgcccttgctaattcttcggacagctgatagtaagacacggaatacagatgcggcagaggggccagctggctgagagcgccgtccgctctctggacctccagcttgtgagcatagcgaaacatcttcggttccaggatctacaggaatgtaatccatccatgtaagattttgtgggtcctctaaatttcagctataattaaaaacataaaattttctcccaagaaacattatagtttaaaagctatagagttgtatacattgtaaagtttcttggatgctaatctctaattcccagaaatgttttcaaaaagtctctaattcttgtgctttgtaattccaaatgaatactaggacagaggattagaaggatcaatttatcttcctttctagcacttaaggaaaaaaaggaccagtcccatcttgacaagctctgtaattctttacaagactttaacattccttgtattgaatgccagtgacagtttgaaaataactcctgcaacttaatatacaattatctgaagaagatttaccacttttccaattcaaaattatgactatataaaaacatgcatacgtgaaaaaaaaaatcttcaaacctattttgcttaatcatggattaaatataaaatacaagcaaaaaattcttttgatattatagtatacaaagagctacaccactcaaccttcttcttaactaataaagacactagggtataattcttaggatgatccctcagaaccacttcaaaccctttggaaaaatgtgcatctccttgaatcccattcttaaccctggttaagaatgaagaactacatcctaccatcagtggatataaccatatatccaagtgaaatttctaagttattcgtctcaatctaataaagaaaactcacaaaaggttatcataaaagagctaattacttttcacttgattctccaaaacaaactgactcacattatttttatttgctcaacagaaacaagtgaaggcacacagaggccctaaccactccacttttccaagtacccacacagagacacagaggcacacacacaggtgagtgtgggggttatcacacacaattctctacaatacactcaaaactttgcattatttatagtgacccatattatcttagtcttctgtttctaatgataattaggaatcataccatacatcactattaaaaataaagatgaacattagcatactttcaaggcaagaacagattgctgtgcttcattaagtcccgagtaaaaatatattttaattaacatttgtttacaaacctgtaaaagttgcatagcaacttcatagatacttcgagaagaatcagcggctttaaacagtatcagattgaggagcatcactgtgtcacactgataatccctagggacaaatttcacatgttagataaacaatgtttagaggctttcacaccagttaataaacatgatatgatataaagggaaggatgcaggcatgcaggggctaagcctatgaggtgactgtatttttttttaaaggcaataggtacgacagatggtaatcattatcactatttggttagattttgttcgagtttaaggtaagaaaatattggtttattaatattgctgagttcaaaaagacacattctgttttttaagagatgctaaataatgaaagacagcaaaatctagagtacctgttctggaaaacattagctatggctttgaaacagccagctgccactctcttggaaccagtgtaacagcgatccaccgcccaatacatcaggttgctctgatccgggttcagctccagcagtaatgtaactgcctcacagcccaactgatgaacctaagtaaaggtcacaaaattgcccaagacaaagaaagggatatattatttatctactcctcttacatttcaattaaaataatacagtgcatatatttattgtatttcatcacaaaactcaagtctcctttagttcaactctttctgattttattcaaccagcagaaccaccaacacagagaaattaaacgtggtctcctgctttttatataagactcttagtcgtaccattcaattttccagcagagccccggaggtggctgatgaatgggaacagtgattaagtgctttcaggaaaatgagtgattaacctccccagctatttttgttgaaatttattcttatttttgatagcccaatacaaaatacatttcttccagggggaagaaatgtaagtcttattttaaattgtgaagtctgtgtttgtatggtatgagtaataaggggggaaaagtgattaattggagaattatcaaaaaaaattaaacagagcaaatagcatatttcttccatggagcttaaagtattccacaattatactcttttactgatttaaaaccctttgtgagataaatacacactactattctaatcctctaagagggaaattaaaattatttaaatgagaactaaataagaattagaaatctcttagtttatggtattctacttagttttacataatatgttttgggcccgtaattctaacctatcttattttaaaaagacatattcagtgagccatacaatagctctaaataatgcagagagtgtgtgtgtgtgtgtgcgcgcgcgcgtgctcagtcacatccaactctctaagaccacatgaattgtagccgcccaggctcctctgtctatgaaatttcctaggcaagaatactggagtgggttgccatcttctacttcaagggatctttccaacccagggatggaacctccatctcttgcgtctcctgcactgacataatttacccccagcgccacctgggaagctcccaagtaatgcaatgcagtggtgatttactaccaaattttaagggaactgtcataattacctttttgtccagagagtccaaaatgttatccaaccatttgtacaaatagccatctgatgaaagtcctacattatctgcaacagggccacaacagagtacagcagacatagccttcaaacaataatattagaattacatttaaaacatttcagaggttaaatgttggttgcttaatgagaagaggcacgatattttactcatgcttatgtagccgcaatatctttaatttttttgtttacaaagaaaagcataatagtaacttttgaaactaagaaatttactatgagcagtacataaatatcatgatactacattagacatggagtttgaacagtactggaggtgaagggaaaaaaaagatcaagagaaagtacttaagtaagaaaaaaataagtattttttggaggcaatcaattctttaagaatgtggcttccaattttcatagattttggaatatttctacattacattttatgcatttaaataaacttccagaataagtatttgaataaagcaggcaaatatatattctagtactctcaggtactctgaagaaatcctgatcctttttataacaccaggcactgagagaaaaaaattttaactccaatcttaacctaagaaaacagaagtcagatttttaggtaaataccttcagtgcacagtactgatgtctgttaatttgcatatttctatcactgtatctgtccaagggtgtaaacatgatgctaaaaggacctgcccagtgactgaacagcataaacagactgtgacgaaggctctgttgaggaaaaatacttcttctctggtgcactgtgaataaaaaataggcggaaaaattatttccatttcttcttcccttaatatgcacgtcagtttatttgttattggatggtggtgatgttagttgctcagtcgtgtctgactctttgcaaccccatgggctgtagcctaccaggctcctctgtccatgggattctccaggcaagaatactggagtgggttgccattcccttctccaggggatattcctgatccagggattgaacccaaggctcctgcactgcaggcaaattctttaccgtctgagccaccaggattgttactggatacataatattatataaaaacaaaggaaaagttttcattttaacctactcccaacctccatagtaacagaaactatttacatatatgcatatcacaggaacagagctgcagtgtacactatcatggtgagatgcggtattatgtgaaatatagcatcttggcaagtagaagcgcatggcagtcacaatgctactgaaggctgacagagctgggcatcaggaccctgcttctctccctgggttgttgttggctacgtgctaaccttggccaaaacattaacacaacatacttctggatcatgattaaccggtaagagagggctttggactatacataccgttttcagctatataacaatcattacatggaatcttgacatattgatacataacagacgacaagggagctgatctgcctgcagtaaagcatgaggtctggagtcaaaacccactctgctgccttttgctgctggtttaggtgatctccaaggaatctttccacttaaaaaaaaatctattctacaagctctctgcagcaatccttgttgaagaaactcaacagtatcataatgaaccaaagtagaagttgcagacaagtgctgagtaatggattaaatcatatctttacattagtgagcttcagctcagacaatgtagaggaaaccatggagcatcatgatgcttcctctatggagcatcatctacctctcaccttcccaaagttactctgacatatttttcaaatgttcacaagttgcttgtcaacttagattaccattcctcagggggagaaagattatgatagtcttttaatattcacctatgggtttgaggaactgaaaatcatacctggaacattctgaatgatattcgccactaaggcactaaaatggcatcgtatatccttcagtgtgtcagaatctttttcattttctgcttccaggagttgtctagttaaatctacgtattccaataaagtgttgttgaggaaatgtgtttcactatcaaggccaccacttgcactgaaaatatggaagaaaattcatgttaaggaaaacactgattttaaactataatttaagtcaacattattctctccatcaaaatatacggcttttcaaaataaaaatataaggagacacaacgggaatagggaggatcagtttagaaggtagaaagaagaaagactaattgtgtacatttacacagttgtcctacatagacatattatgcctttagcataatcaatcaaatatccatcaggtacctattctcagcaaaaattactgctattactggggatgcaaaaatttaagagaattcaagtaagactgttggtattttaatcttctattttagaccttggaaatttaagaatctctacaggaaggttctctttgaggccagggttctgggcctagagtccagtgactgcaaggagtcactggtgaaagagtccccaatcctggattccagtcttgtgccatcagctatgaagtatgtgaccggtaggtatttgagagtgttttaccaacagaaatttagttaacttttccttgttatatttatctgaaatacctctaaagtttatgattccaaaagtaaaaatactctttcaatagctacaaatagttttttataaacatcctaaagccatgaaaataagagtaaggagccacagtgattgtacagcatattaaaaatatcaatctatgactataaaaatacgttgaatgtattcatgatgaaactctcctttattccttaagtaagtgcttttaaactctgggtcaacacttctcagtggctgggaaaccaacatggtagattgtaagctgactcagaataactgagtacctactatactatgcaccaggcacagaggatcaactgattgaacaaactgaagatccctgcctcctggccattccagaattcatctttttttccttaagtgagagagaaaaaaaaaatgtccataatagtgttcactttattttgatttctcttggggcaaaaaacaaaaaagacaaatccaaaaataaaacatgcaactgcattactaacattacaataaaagcaagaaaaaaagaaaaaaagatttagatgtattttagattaattttttgcttcaagttcagcaagtgtcaaattcattttggctaacttccatcgttttatttttgtgaagtagcaaaggaaaaaaaaaaagaatgacgtttcttttttctttcatttgcttttcatgtactataatagtaaatcaatggtttagattctctttgattaaagctatattttgaaagcacttgtgaaaaacattcgatgttaaatatgaaacgtgttaggcacactcagaaataaatgatcaggataaatggtaaagtaataataaatactgtacttgcttattaatatttttttcctcagtatcttttctggaaatggtcagattcatttttttactccttcaacggtcagccaacaccattatgtttctagggaaacagttatttccctacataaagctgatggaattttcctcaaggcgtaattttaggttttatgtttgtttgtaaagggtggaaatagaaattatgtgtttggatttcataattgctctaagcacaatagattaacagttgattgaagtaaatttgcaaagttttttaggctaaactttcatgtagcctttaaataacaagatttttacaactctagaaaaaatagatcttgaataaggtaagacatagttaaaacagacacccatccctggggaaaaaaaaaggttgctgtctactgcctagattactagatctcaagaaatattaaaatcataaggacattccactcaacctttgcctgaagcaatctgtacaagtagtagttcttcaatatattttttagccatgggctaatgtattagatatctttagtaaataatatttatagtggtgcagattttttgttgttacaaaggtacttttcggtttttatatatttcctaagagaaaaaaaaactatgttctctaataaatttcaggttttaaaaatcaaaatccagtacctacctgtgactaatgacaccagcatctgccagcagttcaaatattcgtaccagttgtactcgtaaaatatctcgacgcctgcgccgtttcatattctatcccaaagataacaaagattctaattaaaagtcctttaagtaagttgacagaaaatttgctggtgtaacttagaaggaatactgggaatgccttacgagtttggagccttgttattttgcttctgcaaggtagatgtcagacagtctaggggctattacatcaaaaaggtatgtgtggattaatttgaaattaacaagataataaaataaaatgacattttatatagtaataaacttatgaagggagaaatagaattaagtccatatttactttatggttacttttaggtcagatttgctaatctgacaactttagaggaaccgaaacagttagtaaactattctctttggatgataaagaatccctaagatgctcccaataatatgacagaaagggagggaaaacatcacaaaggggactaaagaaaccccatagatttcactcataccatgatttttcacttatcagttaattctgacacacaaaaatacaagcagaaagaaattcctttgatcattatggtgtgaataaatatgtttatcctaaggccaaagtattaatgcctagaatagtcgtcgtaacatctcaacttgattctgcttctaacaggaaccaatataatggtaagctataattaatctcctgtatcactttcttcttgggctcatcatttcattcatgatgtaatacagactactaagaattcatctttcactttcttgtctacaacccagttttctgccttccaaaacaggccagttgtagataaccagttcattaaatttactgcttctctgagctcttatcaagtttgctgcaatttgtactgaatgaaatggtttaacagtgcttgaggatttctgcaaaggtttagttgacttgctttcattctgtgttcattcatagaaagactgtgagtctaatgctctcaaaatacagtgcacattcagacacatcactgtgcatatctattcccttgctatgatgactttttgtcctgaaattgattagtatacatactgccacttaattttatttccaattccacttgtactgtaaccaacatattattttgaagcaaaaatctaatcaattacaaaatggagaattatcactactccaaagggctgaattagaaaaaaaggaagtgaagaattacagatgctgtcataaggtccccatacaaagtagctactgtcatcttcctctcttgctaaaattcctcagaggactgccatcgttgctagcagtcattctaattcagtgttctacatcagactcatctaaggtgcttaagaaaatagatttctgggctctactccagggattctcattgaataagctaggcccaggaatctataattttttgcaagctctctggctaattctcagattctactgccatatggggaccactggtctatcggataaagctgaaaccaggagctttaatcctttcacatgatagttcctttcttgctttccagcctaacgttccatcactttccccataacataattacaaagaaaaacatgcaatgtacaaattttttaaaagtaaagttttcaaacgctgttccctctacctagaatgtctttcccttgcttgtctactggggaaatatgcttcagaaattcacctcaaatgtcactacctcaactaaaaagctttctcttactccacaggcagaatcaaaggctttcttctctgtagctcatctaaccctttacctattacttgatttgtgtgcataatacattgttgtaattatagattatacaacatctgttccaaaagaactgtgatttctaaatgtagctcagaactggacgtgtagatatggggttctagaccgggggttggcagaatacagccctcaggccagatccagctcactgttgcctgtaactgtaacagagccacacccacctatttagctgtctaggcagcaaaactgagcagctgcaacagagacaggatgacctacaaagatgaaaataactatctgttcgtttacagagatcagtggactctgatccagactctaaccaccctaacttcaggcagagaaaatttaacatctgtattacagaattggtttctgagtaaggcctcctggggagtggggatggtagtggtttccacatgttttaaaaatgttgaaaatggcattagacttatttacttctgaatttctaaattttgttatactatatagaatataaaagccaattttaagtgtttgccaaataaatatttaatgatataaaactacacagtttacctctggccttcgttcaagtgcctctttaattatgggatgtaattcctctattagttccctagaagaaaaataatatatattctttcaattaatagccaagcatataatctgacctgtagaaatatgtaaatattaatataaatgatacaatctgacaaatgttaaccctaatcgtacagttttaaacacaatttttattgtcgttttgttttttttttggtcatactacatggctttacggaatcatagttccccgaccagggatcaaatctgggtccttggcagtgaaagcatgcagtcctaaccactggaccgccagaagtctctgttttgttttgattgtgaaataacacacacactctgtagaatatttgaaaaattgaaaaaaatggtataggccacttattctaatttgtagagataaatacctgctcaatcattttatagcccatatatagtttacatagttgaaactctaacatacataaaatattatccttttatctttaattaacactagtataagcactttcacatgccattaattaatttataatactctagtattgggttgaatatgataattttcctaaccattttcagttattaatgactcattaaattttatctgttaaataatgtccagtgaacacctttatatattaatctttgagttcaattctgattatctcaataggattagtccttacaaatgaaattatcagtcaaaaggtatgaacttcatgaaaataatcttttttttgcttatatcctgattttaaatttaaatgtactcactgtagaaaattgggaaaatacaaagaaaaaaagaagaaaataaaattcatctgcaaattcattgtccatagaaactactgtagacattcaaagtatctgcttcagaattgtttctatttatggggatttgtgaaactgagataatttttgtacctcactgttttctattagcacaacagtgtatttgctgctgctaagttgcttcagttgtgtctgactctgtgcgacccaatagatggcagcccaccaggctcctctccatccctgggattctccaggcaaaaacactggagtgggttgccatttccttctccaatgcatgaatgtgaaaagcgaaagtgaagttgctcagtcatgtctgactcttagcgaccccatggactgcagcccaccaggctcctccgtccatgggactctccaggcaagagtactggagtggggtcacttcatttataatgaatgctatccacacctacagatataatttattaatctactctctgttgtatatgttaccttggagacaaaacatcaaacattacaccacatcaatagaggacaacctcaaaagaaaaaattcaggatccagaacttccctggtgacacggtggataagaatctgcctgccaatgcaaaagacacaggttcgatccctggtcgaggaagattccacatgctgtggagcaactaagcccatgctccaaaactactgaaccgtgagcgctctagaagctgcatgctgcaactgctgagcccacgttctgcaacaatgaagcctgcacatgctagagcctgtgctcctcaacaagagaagccatggcaattagaagccgtcactacgcaatgaagagcagcccatgctcactggaactagagaaaacttgcacaaagcaaggaagacccagaacagccataaaaatataaatatttttttaaaaattcaggatctagtcagcaataacaaagaagaaactgaggcaaaaatgaagaatttgctttatgtttgtgaaaaacatcaagaatgacataaaatatgtacataaataattcttttaagaatagtcactctcttgaacaagaaggagaaaaactatttttaagcaacagatcaagcaacagaatcactatgtaagagaggaaggaaaatatacatttacatggcatcttatgatctctagaacatgtttatgtataatatatgattttcataatcattctttgaagaaaatagggtaaatgttaagcaaaattagaaaataaaggtacagataaattaaaggacctgctaaatgttaaatggctagctagttggtaaaagtcaggatcgatatgaaactatcctgataagtatgctaccttgccatctcaaaaagtagccacttttactattttactacatagagaaacatataaagataattacctaaatgctcctgggttggtcctgccaagacctagaacaagggattcagtgatttccatgctctcagagcgcatcattggaactatgtgcttaaacaaggatgaaggggatgggatgccaataatctgaaaaaaagacattatatttatagtagccactaatgatagtacagtcaagtaaaaaatatgacgtttcaacaatatttggtcacagacaatggaataacgacattttagaatgaatggtacttcagaattcacctctaacgtacataatcttaaaagggtcactgtgaatttgcacactacaaatttgttaacagaagtgggatttgcaggcctcttaatttcttacagacactcactatcatgtaatacaggctgactctctcccttagcctatttcttttgacctgtaaaaataagtaaaaacaaaaaactacttctaaaagaataatcagtgttaaagttaaacacccagtattaagttttgtcagtttccttcaaccatctgataatattttatttcatatcatggagaccatatcactgttcttatcaagttatttgtcccactacataatttagggaaattctaaaagaaaaactttatatattattggttccaactaagcatccattaaaacaatgggttggccaaaaagttcgtttgggtttcatacattgctatggaaaacctgaaggaacttttgggccaacccaatagtaacggggatttcttgaaccattttcagtattagtgcctgtaactaatacacttttcaatcaagttactttactgtcctgaaaaagaaattttaaaacattccttttatgctgtcatttggattcaatgacagaactcaacaacttactttagaatcaatgctgtagccactgtcaggggtggacgccagcgtctcaggaggagaacacctcacagaacccgcagatgtcgagggcgctgtggaggtcgccgcgctgcagcaaagaagcaggtagtttctccacaggccaatgtatgagtcactgcttgtggtagtactgactttcttagcattgatggggctactgagaaaaaggagaaagacaggtagatgtaaataacatgtgtttacacaagtttcttttaaacgaaagctcctccgtccatggagttctccaggcaagaatcctggagcgggtggccgttcccttctccaggggatcttcctggcccagggattgaactcgggtctcctgcattgcaggcagattctttaccatctaagttaccaaggaagtccaactaaagctaaatttctaccaatttaggggagatggttagcataaagaattagtactactgaatctctgtggaataagatataatgagtaaaatacaagattgaaagttaaaacattataggatcattttaacataatctattatttctgtgggtacagttaatattttatcaggtcacattttataacttattatatatactcaacgcagaggaaaaaaagtgaaaacaaaatgaaaatcaccattaatccaacaccaaaataagttctatatattcttctacacatcttcaattcagacacatgtataaaggtataggtatatctcttttagcttataaaaactgaataataatcatttcatttgttttgtacttgttctttatacttaacatatatgttgaaacatccttcatataaataaatatacttccatgacctcattgttgatgaccatatgttatatcatagagattattataatttatagaggcacactttcactgttggatatttaagctaacagtaatttttccctgttatacacaatattaaacatttgaatatatgcttaattataattcatgtttaattattttcctgggtaaattcctgaaactggaattgcagagtcaaagaatatctacatttttaaagcttctatcaaatttctgttttgagagattagaccactaaaatattttggaacgattccataaatcttctcaaaaacggaaaattctgttgggattaacgactgagagcaaaacaaaacaggaaaaatactaagttttagtcctcaccttcagtaggcttataatctattaagataaacaatatataccatgccattgattcatcaatagtttcttaaaaaagaaaggtttcttaaacaaaaaaaaggttcagagcactatgatgggagtaaaagaacaacaaaaaaaacctgcttaaaaaaatcaccaccatcatgtgtgctaggggagatatacaacacagaaataaaagtgtcagatggtgctaagtttgatgaagaaaaatagagcagaaagtggatacagggaacggtggtaggagagtgttaggtggtaggagaggtattttatcatttaaaatatggtaaaataaaggagactaaataagttcataaatgttatacaaggtggcaagtgtcaatcttcattaaaaaaaatggcatccaataaacaatacctgagaatctgtatcaatatacaattaacatgtatgtatgctgctgctgctgctgctaagtcgcttcagtcgtgtccgactctgtgcaaccccatagacagcagcccaccatgctcccccgtccctgggattttccaggcaagaacactggagtgggctgccatttccttctccaatgcatgaaagtgaaaagtgaaagtgaagtcgttcagtcgtgtccgactcttagcgaccccatggactgcagcctaccaggctcctccgtccatgggattttccaggcaagagtactggagtggggtgccattgcatatatacaaacaataaaaacaaaaccaaaaaatgtatatatgctttttcaaacaaattttctttgcaatttaagaataagactaacctacagtttataaagccatggtcaactctctgtcacattgtcagttacccttaactctttactatcatgctcagaaactcactgaactcatttcccttcacttcccaccctttatctacaagcttatctatatccacatccatattcatcttcagactctctcgtcattcattcattcattgaacacaaagtatgtaccaagcagtgtgatgattaagtaaatgaagaattataatttgtaagaccaaattatacaaaaagaatgaaaggattatatgactatctcctttacaactttcattgtcctccttaacacaccagtacattatggcatgtcatttatgggatttccaatttgtagaacttttcaagtgcatgtgttatgaaggctgacagtctatatattgtaaaatttacactaggaaaatcacttactttatatcaacttgtggggataacaactgaagccttgtgtaggcaaacatccaagcatagctcacagctgtagggcagtgttttggaaggttttcttgctttaaaaaactggagagacttataatccatgggtcttggccttgggtcacatgtgcaaatatccatatgtgtgatggactgatcacatcaaactggtggctaatgggagaggaattccactctgctaatgtctgtaaatctattgagcttgggcagtacagcaaagtagtctaagcagagaaaaaaattcattattgcatatttcaacaactttcgtaagttttaccatataaattgctttaaactataaaagtggtctactggtagtttctagaacagagattcttaaacagggataatatgaagtctgagatacatttaaggaggtacagaattcctgaaattgcatataaggtttttgtttacatgcagttttctagaagagattatgtaatttttattagtctcaaaaagatgtataaatcaaaaaggttaagaatcaccacttatgtaattcttgtatgaatatgcaactcacaggatactcaagatgctagagaactcaaaaatgaaccattaactttcatgctgatgtgcactgcaagacaagcgaaaatgtcagttgcgcagtcatgtccgactgtgtgtgactccacagactgtagcctgccaggctactctgtccctggagttttccaggtaagaatattggagtgggttgccatttccttcgccaggggatcttcccgacccagggactgaacctgggtcttccacattgcaggcagattctttaccatctgaggtatcaggggagccactgtgtactatgtatgcataagtggaacagactggaaaatgggctcctctccagagctgctgctgctgctgctaagtcgcttcagtcgtgtctgactctgtgtgaccccataggtggcagcccaccaggctctactgtccctgggattctccaggcaagaagagctacacattctcaaatatttgctcaataatagtcaaagctcttaaaatgaagagataaagacttcagagcaaattatttatgattcaatagacaacaaaaaatggagtcttaaaaactgaacagaggcttgattcacttgatcattcaacagatatttacaaaggacctgctctcagtcaggctagaagagagtcactcacttctcttcttgttggccaagtcatagttaataatctaaaacagaattctttaaattgaacagaattttattattctctctcttggttacatgtaactttgagttgtaagagtcaagagttatgtagaaagcacagaaacctcttgtgcaggtattgcaaaacaggaagaaaataatttcaattagtaaagtttgatacttattcctatatcagttttgaaaacttgatatatgacctttctcccccaaaccaaactaagaaagatagcataagctttcttagtaatgtatatgttgatgaagtgtttttcttcattttaatgagtgaaattacatctgttgctgttgtttagctgctaagttgtgtatgactcttttgcaaccccatggactgcagcccaccaggtttctctttccatggaattttccaggcaagaacatgggagtgggttgctacttccttctccaggggaacttccaaacccagggatcgaacctacatctcctgcattgacaggcagattctttactactaagccacgagggaagccccaaattacatatgactcaggcataagatattacatatttactctatgctcttgaatttatataaagcaaacaaatacacttactgcaaggtgcagaatgcaatgtttttgctttgaatttcacagaaataatttcgatagccctttaccagcatatacaggtcaagaatactatatgccataatcaaaagcaaatagtagtcaattgcaacttcagatttaatagaaacttcttagattggaaagactggaattttataaagataacatatttatatttttgtggggaagagtactaaccatagcataaagtagtgctactttgtgtatgccgctttttaaaaattattttttattttcaaagcactttaccattttcacaaatactttctaatgcatgatatttgtaaaagaaactcaggtatgtatgtatgtacatcttaagtttcaaaacattgctgaagagcatgaaatcattacagttacctgatcggccccagtgagatgaatgaagctctcaagaatggatgggctcagcctgtccatcacatctatggctaattcatcatcaccctataaaaaagacatcacatgtctattaaagtttaggaatgttaaagaacagcagccaaacctagataaacattacaaatatactctagccctatctgttacaaatggaatagaaggcagacaggtgagcttagaccctctcaaaaagatcttgttaaaaagtaaattatacctgcatggtaaaaacagaaatggaacaaagatgaacaaaaggatagttttttaagtactttcattagatagctgaatgaaatatctaaaatttaccttaggtatttccaaaagtgcaaataaagcccgtatttctctaaggacgctgacagctaatctcctagtggcaggtcggctgctacagagagtgacgagtgcaaacccttcgaccacatggactacactggaatatgggctcctttccagaggagggggatgagaggctccattaactacaccatgcttgaaaaacaaaacacaagtgaaaaaaaaaaagtatgtattccagtaaaacaattagtaaagagtaaagcaaatcataaaaatgactgctacaggtctgcctcagctcaagaaatttaaataacatttaatttataaaaataacatttaatttataaaaatttaaataacatttaatttataaaaaataacatttaattttttcacttcatatagtgaaaaaagcatttaattgacagtctaaaacacatgaatatgcaatgtacctaagttctataattctctggctactttgtaaaaagctttagagttgacacttaatcactattggtccaacatttctatatagaaaatgaaggattgaatggcatcctctgtactcaaagtttggaccagcagagtggcgtcacctaggaggtggtgatgtgcaggctcattgaacattgagaagctgggttggcttagatgatccagctctaatatccaaggttctatggcttccacattttcacaaatcaataatttgagcaccctttacggttaagaagcacacatactgtatatgtgaaatggggaccactggtgcctttgataaacaaccaaataactcaactgaaaggctatcaacatttttttattataccagcattcaatatattggaaacagcctatatgtgagttagaattgcctccactttattaccaaaggaagaatttaatttctatatttaatacataaactataggaaagttctgtttaaggggttacaaacattgtgaaaggaagtaaaactaaagaaacttctaatttttgaggaagagaatatgttttaacatcataaccagtcgtttaccactgaccatgcacagaggaacactataaaatagtctggtacctgtgagtcctggtttttgttatgcatttgggttgcttgtttccactgatttattaattgtaccaacatctttacagcattatcaagaagtgtgggatggacatcagtcacttcacgaacaataaaataaacaaatcctgaaaggacatcctcacgccaatctggaaaatcaagcattagtgcctgcagagtattgaaagccagagcacgaagttcttcatccatatgaattgtgagcctaccaagaacaaaattccattagcaaacctcaaaaaccttccaaagagctttatcatctaaaacttaaaactaagaatttaaaaaatacatcctctcaattggttcttaagaagtaagaaaataggaaccaatgttcactttttgtgctgtatttgtccttatgctaatctgtattcacttatttaaattcacatgtcaatctattaatatcagttggcatcaaaatagtaagtttgataattcagaatagtaagttcgatcataagtcaaatgctgtactttagaaaacacagactaacgaaccagaattacattttaaaaattctgtaatccttaaaatgccatatattattctataatcaatcaaatttatgcggaattatataataccttagtactagcttacattgatttagtcctatactatcaatggaaaggacacagtttatctctattgctcctttcacgctgctgagcttacagttaaacataagatggctgattgtgaagaaaaaaatacaagtcaagatggaatgaatttaacagaaataattcttgaaaatgaaaatgagaattaagctgtaacttcataaatggggttgcctagaaagaagatgaaaaaaaaaaagagtaacacatgaagtcttcaagagaatttatgttaagtaaattataggagaggctatatagagttaccttttaaagacatcaataagatagaggacaggaatgtaatattagttaaaggattttgataggacttaaaaaagagaatgataagaaaatcataaaagatggctgcagcaatgaaattactaatatttaatgctatatgagtaagagtttctatttggggctacagagaattatttacatgattgaccatcaagacacatgtatcagggttagaaacagcctgaatgaataaagataagtaggtgatatttaaaaatatgccacagttacatgcttgggcagctgaaaagatggagttatcctcaatgatagaggaagaacgctgtgtaatatcagtcttcaccctgctgaactcagttctggtcttcactaagctaaccttcactgataatgagactgcggagaaaatgtatacaattgtttaatacaaagacccggaagtgagccatgaagcagcagcagttacagcagcactctggaaataccacacagggtcagatcaagggtctcaatccagtgctgtgtctctgatcgtggcaccaaaggagagactgtgggaaaggagagtgaccaactccacgctgctggctataaaggttgttcaacattccgtaaatctatgaatttacacctctctgtgtgactcgggatatatccatgcagagaaaggggcctgattcatttatggcaggagaactattgaaccgttcctggagacagcagacaggtctgcaaacttacagtgtatctttgctttgtttgtttgcttgctttattctaagtaaataagatttagacatcacaattgcaaatgataggagctagggacaaaataagcagacccgggaatcaatctttctaacaaaataaattaagtatcacagaggaaagaagcaaagtcaatagcaaagcaaactgtcaaccactggctagatgtctgctcctttactcggctcctccaccgctgccccttgcggatgcaacttcactttggtggggaatatggactgccatccacaaaatggtgaactaaattgaggtgggaggagtaagagcagaagtgaatgacacttgtttactgctttctcaaggaataatattataaataattaaacttgttttccctccctaacactgacaggaactttgttaactctgcaatctaatttatagcaagagttaagagatacagtgggaagggatgactctatctcagggtgccaagtttcaaagtcacctctttcttctcctcctcatccaataccattcaatctcttagtgcaacccttaagagctgagggtgggtagtgtatgggtgtttgaaatgctccgtgaccagggaggtgggaaaggctgctggagcagtctattaactgtttattcattgtgagtttaacttaacacttagtaataagagttcagcaagtagtaaacatcttcgaatatggtaagatatcactgttccattgacagtctttgtgcttggtttcccattagggcggggccagtaaactatggctcaagggccaaatccagccaggctccttaacaggtggctgcttcttcactacaatggcagagatgaacagccgtgacagagaccacgtgactcacaaatcttaaaacagtcactatcttgtcttttaagaaaaaagtctgctgaccccttatttaaagagaatctccaactgtatcagcaaagcagtttttcaaaaggccatcacttcaacttagaattatttccaggaactggtatttaagtttggatgtcatattaattactctttttatagagcctagtgaggaaagagataaaaacttgaactctatgggctctgcaataagagaaaaaaagtgaaaatgagacctggtcaccaccttaggtgctaaagaaaggactataggagttaacacaataattaattgcctagtgagtgtcatcacacactgataatgtccatatgttaacagaacatgttctgtaaatcccaagaaataataaatactagatgaaaaggcagggaatttaaaaataggatttataggggaatccagaagaattttaaaagttaaaagatgagtaaggagaatgtgttaacaaaacaaaagacaaaatgggagtttagagagttatccacggattaaaaatgtctttatcactacttttttttagtgataatagtaatgggatgctttagaaatttaaaaagactgactgacataaaagttaaactcacaaacaggaattctcatttaccttgctaacagttcaataaggtcagttctgctcataccatcaggaatcagccttggaatagcagcaatgcaagttctaaacaagtcaattttgggttttctttccccgctaaaaaacagattacaagaggacttaataaaatgaatcttacatacatcaaacaatgaaagcaaacttagaaaaattactacagaaaacatgagcccacctccaaaagtttaatgtatttaacataataaaaagagtatacacatttccagtaaataattatcagtttataaatgcaaaaaaatcatatataattaaggaaaaaaacacagctaacaagaaaaaaaggttttcagtaattagtaattaataactaataatagagaactagtaatagataactaataaggacctactgcatagcacagggaactctattcaatactctgtaatagcctacatgtgaaaagaatctaaaaaagagtggatatatgtagatatgtaattgattcacccttctatactcctgaaactaacgcaacactgtaataaatcaactaaacttcaattaaaaaacttttaaaaaaagaaaacaagcataacaaatattcaaatagtaaatattaagcaaattatttattggtggcgcagtggtaaagaatctgcctgccaacgcaggaaacacaacagacatgtgtttgatctctaggtcaggaagataccctgtagtaggaaatgacaacccattccagtattcttgcctggaaaattccatggacagaggagcttggcaggctatatagtccatggagtttcaaagagtcacatatagctgagcacacacatatacatttatattatttattaattgtttcaaataagttaaatctctgatttaacatttgatgtatatttaattattaaaataaataatatagacattaaataacctaatattagttatttttgggggcctataaaattaacaaaaaattttctttattttcaggatcatatactaacaggagttttagaaaacagacattctcatataccactggtggtattgtttgttcttgtctttttcttttacttcagaatatacaaacacacacaaaaataagcatattgtttatgtaataaaatatgtgaaatttggaaatcctggttcttccatatgcttgatacaatttaattcacctgtattttccctagttattcaatgattttatttattcattttaaatatctaaccttttatatactggcttttattgtgctctatatttcaagggaaagccgttaatttatttgacacaaattgtccttcagctgacccaataaaacaatttttatatagaaaagaattgggatgttttaagagttttggggtcagtatttattatagtggctatgaatctactacttgtttttagtgattttataaatagtcagtcttctcttagctttgtcccaatatgcatgattttacttaccataatttagtcaaataataccagtccccaacagtgtggttcaattttctgttacctgatattaactgaaagtaattgtatagccaagcttccctactagctcttcagcctacaaatcaggatgtaaataacagatgtgtgtcataaccaatgatttcatcacatcaattttgtctaagtctgttgtgattggtcgctatacatctgttactcggttcacacggcaaaagtgggtagctgtgttgattccctgtctctagtggaaaactcaggtgatactggacaaaaatggataatcaaaagagtaagttggccaacaaaaattaaagtacagcaaaggaaaaaggaagtgaacactggaagtgaaattcaaatcaaacattaatggagttacagaagaaacagctgatgagggcaagcagacactgctgtcactgaagatccaacacatgcagtcagaggaactcagtgagggcacattcgtgggcataaatgaggcaagtgtggccaaaaggatgaagatttcccagaggaagtaatgcaaggggaaagaaaacccttcacattagagaaactctcctggggcttgccaggtggcgctagtgggaaagatcctgcctgccaaggctaatgcaggagacaaaagagatgagggtccaacgcctcagtcagaaagatcccctggagaaagaaatggcaactacgccagtattcttacttggaaaatcccatggacagaggagcctggtgggctacagtctatggggtcacaaagagtcagacacgatgaagtgacttagcacgcacagagatgttagcatatactagtatatagcaaccatgcattcattgagagatccagtatccaatttgatggtctaagacctacaaagcagatattaacaccataaaaaattcctcctgtaaaaaatacatgtatattttctagcaagtaaaagaagttgttgccataaaatatatctttctgagaaggaagtccctaacaataaagggaaactctgtgttgacaatcagtcctgggagaggggtggagggtgacatgaggtacagtttctcatacaaaaaacttctcatacattatttacctctgtaccctcagttcccaggaggttttcagaggttttcttttttgttgaaaaaagctctggaaataacagcatttatttgactatgccccgaccagtaacaccaaagaagctgaagttgaacagttctatgaagacctataagaccttttagaactaacacccaaaaaagatgtccttttcattacagggaactggaatgcaaaagtaggaagtcaagaaacacctgaagtaacaggcaaatttggccttggagtacagaatgaagcagggcaaaggatgatagagttttgccaagagaatgcactggtcatagcaaacaccctcttccaacaacacaagaggagactttacacatggacatcaccagatggtaacaccgaaatcagattgattatattctttgcagccaaagatggagaagctctatacagtcagcaaaaacaagaccaggagctgactatggctcagatcatgaacttcttattgccaaattcagactgaaattgaagaaagtggagaaaaccactagaccattcagctatgacctaaatgaaatcccttatgactatacagtggaagtgagaaatagatttaagggactagatctgatagatagagtgcctgatgaactatggaatgaggttcgtgacactgtacgggagacaggaatcaagaccatccccaagaaaaaagaattgcaaaaaagcaaaatggctgtctgaggaggccttacaaatagctgtgaaaagaagagaagccaaaggcaaaggagaaaaggaaagatatatccatttgaatgcagagttccagagaatagcaaggagagataagaaagccttcctcagacatcaatgcaaagaaacagaggaaaacaatagaatgggaaagagtagagatctcttcaagaaaattcgagaaaccaagagaacatttcatgcaaagatgggctcgataaaggacagaaatggtgtggacctaacagaagcagaagatataaagaagaggtggcaagaatacacagaagaactatacaaaaaatatcttcatgacccagataatcacgatggtgtgatcactcacctagagccagatatcctggaatgtgaagtcaagtgggccttaggaagcatcactatgaacaaagctagtggaggtgatggaattgcagttgaactatttcaaatcctgaaagatgatgctgtgaaagtgctgcactcaatatgccaacaaatttggaaaactcagcagtggccacaggactggaaaaggtcagttttcattccaatcccaatgaaaggcaatgccaaagaatgctcaaactaccacacaatggcactcatctcacatgctagtaaagtaatgctcaaaattctccaagtcaggcttcagcaatacgtgaaccatgaacttcctgatgttcaagctggttttagaaaaggcaaaggaaccagagatcaaattgccaacatctgctggatcatggaaaaagcaagagagttccagaaaaacatctatttctgctttgttgactatgccaaagcctttgattgtggatcataataaactgtggaaaattgtgaaagagatgggaataccagaccacctgacctgcctcttgagaaacctgtatgcaggtcatgaaacaacagttagaactgaacatggaacaacagactggttccaaataggaaaagaagtacatcaaggctgtgtattgtcaccctgcttatttaacttttatgcagagtacatcatgagaaacactggtctagaggaagcacaagctggaattaagattgccaggagaaatatcaataacctcagatatgcagatgacactccccttacggcagaaactgaagaagaactagagagcctcttgatgaaagtgaaagaggagagtgaaaatgttggcttaaagctcaacattcagaaaacgaagatcatctacccagtcccatcgcttcacggcaaatagatggggaaacagtgtcagactttatttttctgggctctaaaatcactgcagatggtgactgcaaccatgaaattaaaagacacttactccttggaaggaaagttatgaccaacctagacaggataataaaaagcagagtcattactttgccaacaaaggtccgtctagtcaaggctatggtttttccagtggtgatgtttggacgtaagagttggactataaagaaaactgagtgctgaagagttgatgcttttgaactgtggtgttggagaagactcttgagagtcccttggactgcaaggagatccaatcagtccatcctaaaggagatcagtcctgggggttcattggaaggactgatgttgaagctgaaactccaatactttggccacctgatgcaaacagctgactcactggaaaagaccctgatgctgggaaatattgagggcaggaggggaaggggacgacggaggatgagacggttggatggcatcaccaactcgatggtcacgggtttgggtggactccgggagttggtgatggacagagaagcctggcctgctgcggttcgtggggtctcaaagtcggacatgactgagcaactgaactgaactgactgaaaccagccatgtccacacacatctggggtagttaggatttatccataaggcctcgtcactgacaacgaactgtatggatcaagggtgacttctgctatctatattgacttgacagcacataaaagggtaaaactgagcctgtgagaatcgctatatcaaaaactgcagcagatggcaataggggcaaactccagaagaaaaagtaagggaacaaacaagcagaatcaaccctctatacttatgaaaactgaaatagcaatgaagagaaattactgactacatacgtaatcatatcttcaggctccttattggacatctgcacactagtcatacacatgggcctcccaacttctttgtccaaatgtcttagaatgctatctaatgcttttctcacttgaggataataaactgacattcctggaggagaaaaaaaaaaaaagctcagttacaaaatgtaaaacattagacatagaatagttattctctgtaaaatataaaaggttattgacttttaattggcattagcttattgatgttacagaagaaattctgactttgacatactcttctccctgatgataagcttcagtatattggaggaaatgtataaaaattatgcacacaactgaatttgaagaaggacaagatgcaatggatagtatcatgtaagaagatattaagagttggacacgactgagcgactgaactgaactaaagaaaatatttaatccaaagtctcctaacatgaaaatttacagatattatagaaaatgtattcattttgtatcactctatatcctggaataacctgacacagacattcataggcaaataaatgtatgtaggcaaatatattcattttagctttgatcataaactttcacaaaagaacattaaactatattatttatttattccagttaacactaacctatgacttttgcttcttcatctgtcaaggttttattgaggaaaattttctttacacgcaaggtgtttcctgagggaaggataactcctgtcgttggcattggcggttcaccatctttttgctgcaaactgtccgctatgacaaggaagactctgaggcctatgttcattctcttcagagaaaagaagtttcaaaataaaaatgtcagaaaattcctcttttttcacgctaaaaacatctcatcaaataacagtgagggatgggaggaagaaggatagaagaaaaatgaacctctctgttcaacattttttaaactagcccaggcattggaatttaacatcaaattcccaagtgccactctttcactctgaggtcaactggctctcctgttttctagcttacttcaaaactctcccattccttcctcagctctactaccctgatactgtaccttcccttctctgagtagacgatttgtctcccacgtcatagtaaaaaaccaatcttcctcaacttctcactacaaagtacaatgatctatttacatctgcaccttttcttcctctcctttgctcttgttacaatcaaggggtgctgatattcctagttatatagaatcctacctgctcttgcattaccaggaaattacactattaaatcattccttctctttcttgcaccttcaacatttcccttttaactgaacatatccgattcctgttcactatactcaactagcataatggaatgatccctccccgttaatacttccctctcactcatcagtgagcatactgctcaaaacagtgggcatttttccttcattctatctgacttttcagcagcatggaacacagtcgaagagttcttctttcctaaacactcccttccttgactatatctgtaccactgggggctgtgtcttatctacccgcatttcagatttaccctcctttacctgggtattaaacattatgctgcttcaaggcaagttcccaggttgtcttttcttaccattatgtgttctctcccaaagtaatttcatgtatttacatgtcttcaactaccactcgtaccacagcacccctaattttaagcctcatttctctgaacttgaacccttagaccaatctgatacttctacttggatgtcaaaaagatgcttcagattcaccatgttcaaaccaaaaggcactttccccacaaactcagtatcttctcagttttttttttttaatgtatttatttgttattctactttacaattctgtattggttttgccattttctcagtaaattatctctctatccaccataccatctcagcccaagctgtcactattcatgacctacaccagtggtctctaaatgggcatatacatcccagtgggtgtgtaagacagttcactggaatacaggaagaaaataaaacttttctttatacatattttttgtccaacatcaaagtttttagctttactcctatctttacatatgacataacgctggtgacattagtctaaatatcaaaaggtcatttcacatagtcatagaagacattttgttaagcatgtcatctataaaaatcagtcaattttgctcactttaaaaatctggaaataattatcaaccatcttaaaaatcctacaaataaaaagcttcaataactttccagctcacttgttaaactactaaatatatacctaagatttgattatgagaagaaccagcacaataattttatatattctccagtgtcattagagtccaataagcaattagttcacaaaatatctttaaacaatctgaaaatttaatatctaaagtgtaaataggagtttactagggaataacacagcaccaaagaagtaggaaataacatttatattaatttgtctttaactaggaatttaagcctaagagttctgattccagaaactatgttctaaaaaaactttttaaaaaattatataggatagtaaattactataattttgttacctctggattaatggtgaaagttttagtagattttccaacactgagaagatcaaatattatttctttcattgcaaaatccaaacgttcctagaaaaaagaaaaacaatcaataaaatcttagaaggttcttctgctatagggatgctttggagatattgtgggtttggtctagactgcaataaagcaaatcacataaattttctggcttagaagtgcatataaaaattatgtttataccatattgtagtctattaactgtactatagtattatacctaaaaaacactgcacaaccttaactaaaaagtacgtgattgcttaaaaattgctaaccatcatctgacaacacagggttgccaccatccttcaatttgatttaaaaaaaaaagtgcaatatctacaaggaaaaataaagcaaactaaataaaacagggctctgtctgtatatgttagcttatcacactagtgaagtgacagtagctcagtcatgtccagctctttgtgaccccatggactgtagcctgctaggctcctctgtccaaggaattctcctggtcagaatactggagtgggtagcacttcccttctctggggaatcttcccaaaccacggatcatgctaagaattatacagacaatgtcaagaatacttgtctgtgaccagaagaagttcctgaatctagttggacaaaaggagaatacgtatgaattaatataatgttaatgggagaaatatcaataacctcagatatgcagatgacatcacccttatggcaaaaagtgaagaagaactaaagagcctcttgatgaaagtgaaagaggagagtgaaaaagttggcttaaagttcaacattcagaaaactaagatcatgatacccggtcccatcagttcatggcaaatagatggggaaaccagtggaaacagtggcagactttattttggggggctccaaaatcactgcagatggtgatcgcagccatgaaattaaaagacgcttgctccttggaaggaaagttatgaccaacctagacagcatattaaaagcagagacattactttgccaacaaaggtctgtctagtcaaggctattttttttccagtagtcatgtatggatgtgagagttggactataaagaaagctgagggctgaagaattgatgcttttgaactgtggtgttggagaagactcttgagagtcccttggactgcaaggagatccaaccagtccatcctaaaggagatcagccctttaggtgttcattggaaggactgatgttgaagctgaaactccaatactttggccacctcatgcgaagagttaactcatttgaaaagaccctgatgctgggaaagactgagggcaggagtagaaggggacgacagaggatgagacggttggatggcatcagtgactcaatggacatggatttgggtagactctggcagttggtgatggacagggaggcctggtgtgctgcagttcatggtgtcgcaaagagtcgaacatgactgagcgactgaactgaactgaatgttaaaagtatatgatcatatatatgtgatttaattatcaaatgattagtttaatacccaaaccagtaggatgtaagttttaaacactcatttaccaaaatcatactgaagatctaagtgaagtaatttccaaaataatgatgaaaggaagcttcgtgataatagttatgcagcaggcctggagagcaagaaattcaaactgggacagaaaaaactgggctccaataaggtaatctccatggaaaaagaaaaagtcaactcagagtaactgacgtttgagaggagctctatagttctggaggaatgctggtgtgaagtgattaatccaagagagtgggtacaatcctagaagaagggatgcgatgaaacggcaaatgttctctgaaccacaaatctaaatcacaatctgctttcattcatgttgctgacacatttctacttatctaattattaattcggtgcttctgtaaatagaagcgtattatttttttaaatactttacttcttcactgtcaagaataatcaccttatgggtcatcttcgttgtcaacagttttggttcaaagagaactcggtgaatatcctggaatcccagtgtttttcctaaattgagaaggtaaccctacctatgcttctccagggctgacgtcacaaaagacaatgtgcttactcagtctccatttactcctcttcaaataaacctgcctttactgcagaggctccaaagctaacgtgacatttcccaggatgcctctgaacaacaggctccagaatgtgagtgaaacccagggaactggggtagaggaggaggagggcagggagaaaggggtctatttcactggtgggatcagggcagcagcgggattctgaagcacctgggggcatacttcctaatctggtagcttttttgactgtggcagaggcagcagcttccttgggagtccagtgttacggtttcttctgtcttgttagtgattctgtaaacaatccatattccttaaaagacccctttggggacttccctggtggttcagtggttaagactctgcccttccattacataaggcacaggctcaatccctggtcaggaaactaggatcccacatgccacatggtggtcaaaaaataaaaataaaaagaccccattgggttcagctatctacagtggattctagtgtctcacctgagaacctagattaatgttattatgaaaacagtgttccactatctttcaagatactcggggaattaattagtttatagactaaaagtaggattatgagattttctcaactctttctaaattgagtgcttccatttgtgggaatttcctttccttctccaagtgtgtagatcaatgatttaaacatattttgcacacacacaaaaatcaatcattagcctcatttattttttactttttaaagcatacttttttcactattctatattaataaatgttttactaccatgcttttagatgtgtaacaaattctaggagtctgagtcactcttataacttccacgtatatatgtattatgagtcagtcactcacctgagcaatgaactgaataatcttcacaaatatattgagaggtgtgtcacgaggaaccacacttcgtgaacctttcgggaaaagtgctgacactatgctcataagacgactagaaggagaaaagatttagtcatgatgagagaacgaaggtaacaaaacattagcaaaatatccttcccatcctgtcaaggtaattcatatccctcctcaaggtatttttgttaactaaaattcattagtgtggttattatttttttaaccaagatgttatttgaaatatgctttgaaacaaaggcactcacctttgagttacagtgttgctttcacattttattctaattacatagacccacaacaatctatacaaagattccagtgcaactcgagacattttaggatctttattctgtttagaaacaaaagagaataaaaataagcttatttattaaagtacttgcaataaatttaagatcaattatattctatcaacaatcaaaagccctttccattcccttttttattcaatacaaaacaggtttcaatatgtaagtatatgtttagtatacggtaagtagacaaagctcaaaagcaaccattaataagggacttgagtcattccttgtattctcaaaacaaaagagtaaaatactagaattatgtattttctgtgtatatagttcaacttacctgatggtaaatgggtcccacaacaatactgacataatgatgaaagaaaggattattcatctttaccataattcattgcagctcataaacagttaaaatttagaacaccaaatgttgttatagatatttgcacttatgaaacaatgcaaaatattattgagtgattatacttaaaaaaaatatggaatggtgggttaaaagcatagactctgaaattgggaataactagccaaacctcatccttggagactgttacattgtttggtgaaacagtttcctcatgtctaaaatgtagattagggtacaaggtaccccgtacctacctcacagattaaggaagttattatattatgtgaaaagcacttggaacactgcctagcacatcttaaatgcctagtatgtgtcaagtgtttacccttaatttttagtttagaacaagaacattattatttaaaatgagaaaagcacccattttgatcacaatttggtcaacaaaccttttcctcatatgagctattataaaaagtgaagttctcaaatgacaagtcatgtagtgggagttaattgtaaaatttgaaaattagctaataatcatctttattaggagaaattctttatgcatctgttaattataatgcatttagtcctataaattagcatttatttaatttggcttgagggatttgctattgttaaacaattattttatatgtaacaatggacaaaagggactttttaaatatgaagtagctgagccattctatcttatattttctcagactacagaataatagacatctgttccctataattagaagcaatgcaaaaaggttactactggagttgttttttaaaaagacaaaaactaggggggaaaaaaatagggcttccctggtggctcagacgataaaatctgcctgcaatgcagcagacctgggttcaatccctaggtcagaaagatcccctacagaaggtaatggctataattttgcatatctatgtatatgaagatttgatataattcagaggaatatcaactattcagttggtcagagtctaaaaatcagtcttttcctctactgtcaaatccatgattccaaattttatatactccccaagtagttttttaattaatttgttactaatataaagtaacatatatagttatacacaatgtatgtttctaatgtaacaaccaagatttctgaaatactttcttttctagcacttaaatacaaggtctcaggtatcaaaataagagttcagttttgggcttccctagtggctcagaggttaaagtgtctgcctgcaatgtgggagacccaggttcgatccttgggtcgggaagatcccctggagaaggaaatggcaacccactccagtattcttgcctgggaaatcccatggacgcaggagcctggtggcctacagtccacggagtcacaaagagttggacacaactgagcaacttcactttcacttagttttaggtacactacaaataatactttcactttgttaattatattttcaaaatatgaatattataaatcaacatgtaataaattatatattaaaaatctaagtctaattcacataaaaattcttctcatataacttagaatatcttatatgctgagacatctgacatgaaataaaatttgattttcaaactttctaagatggactactgtgttttaaaagcagatttattttataaagaacaatgccaaacaagataaaaagtaattaaaaatcatataattgtttatttggtcaatgaaatgctgctatacatgtctgaataatgaagacatcgtcagttaatctaatccttaaacaaagatacataattccctagatacagttctggtctaatttgaataatcagattacattaataaagtccagttttattaacatataataaagttttgatatcagtcaaatatgctcttggcagcaatcattttagtgtttcttcaccttttcctactatgaacaaaaacaaaaaaagagatttacttaaactcaaaccagtaggattgaaattttaaagtgttgcatcaaaatcatattcagtctgagttactgtccccttaatttcattggaaaatatttttaaagtatcatttatttaaaaaaaacacactatataaaaaggtatcataacagctaacataaactaaatagaatatattaaaactgaagatgatggctaaagatcagtactcggtatcatatctctctattaaattcatcttcttggggccacattaatattaaacctttggtagaaagttcctgctgtgtgtgcctcttcttttacaacacaagaagcaggtttgaataaatacattggacatgcaaggcagcaacgggtaaaggggggaaaaaagccacacttaaggagataaagcaatattttactttgtaacatcaacacgactcacctggagagtttctatttgttttctgatactgttgttagatggcatctaaataaagcaatgtgagacagcaaacataaacatgagatgcggcacatgcatgttagatgaaaataagcacaaaacaagacagctcttcaccaaggtctctatttagaagaaatttgaaatttccaagacagtggctagaaacactgagggaaaaaaattctataatttggacatcatggatcatgggatacacctacaacactgaagctgagagaaaatagttaaaattttcaactgtctaatttttcctctaaaagtacagcatttaattttaggcaagttcccatttttaaaagaaaagaagcatacactgtagaaaaaatatttcaattatttttatatggcacctactcttattcctctctttcttattcctcagaaactttaaaatcatttttcacataatgacctcaattgacataaatacaggggcatgggaaactaccaaatcacatttgggagaaaaacagcagatttaacattttcagtgaaaataaactgttgttctctcatgcttttatggacctacagattaatggccatttttctggtcaccaatttaaaaaactagtatgataatttttaaaaaactgtgcactattttaaagtaccttgaaaatgtatatttattcctatgaatctatagaataatgcctttttaataccccagaattatagccaaaagcacatttttaaatatttaagtatagcaatattctttatagtacattatcaggtaacatggtagaccagaaagaacaaaaactatggaactagatggatttagatgcaaatcttatctctattagcctcagttatagtaaaaattaaatgagataccatacttagaaaatctagcctataataaatattaataaaaattatcttaagaagtagtagttctaaaaaaagtgttaaagattactttgagatcaagagattacttgaatctcaaagcaaaatcaatttagggaagaccttcatcttgggccaattttccctatatacaaatcaaataagttgtacctgtcacaacagataactagcatagtttttccctgaatagtcaactccttacctcaactatgcagcgtagccacagtatataaaacttaaaaaggaggaaccaagtcataaaatttctgctgaatagagccttaatgtaagttaagggttaatggtcaagacaactatattccaaatattcatgctaagtggctcttatctcctttagcctggcagattgacacagccattaataaaaatggacaatatgccagaaatgtttaataggaggtaagggttcaaagaaaacagcattttaaatgaaagccttaagacaaaaaaaaaaaaaaagttaaggtactgcgaaagaattgcaaatatgttaggtggaaacgtatatatataaaacattccaacaagcaacagaaaagtatgaattgtcatgaaacaaagcaatcttccagaaacacttaaactgtgtgccttaaaatatgttattataagtttgaagaatcatactacccagaaaattatcacctctctttcagcacctaaatctgtatgaattaccaaaataaggacagaaacaatataatgtacttaattgaacaaaacttattttctggttgcatggcataaagaatttaaccagtttgactaatcctgagaattttcataaataaaacaaagagaatatatcaattctgatccaaatatgaataacatcaatgtatgtatattatggagggaaacagccaaaaatacttctgggaagacctatttttagtatatcttaccaagaaataaaagtatttttcaaaatgatatgtaaaatcatttaaaaaatgtatatataataatgttgcccagtaaatcaatccttaaaagtgagaaaaaaagagccagtcctatttctcacatcatgattagctgttggatcagagataagtcatttaatctctctgtgccttggtttcatcatcttcaaagcttaagattttcagttttaaccctaacttagaggaataacagaaaataaaaagccatgtctacctcactccagtactcttgcctggaaaatcccatggacggaggagcctggtaggctgcagtccatggggtcgctaagagtcggacacgactgagcgacttcactttcacttttcactttcatgcattggagaaggaaatggcaacccactccagtgttcttgcctgcagaatcccagggacaggggagcctggtgggctgccgtctatggggtcacacagagtcggacacgactgaagtgacttggcagccatatttctataatatgtaagcagatattcaaatatattcatttatgcatcaaaacagtattcaaatccagtgttcacatgacattcagatgtagaacattcccattctgtgtcagatattaactgtggtcctgtccacagaagaaaagaagatcctgtgagatccttcagcagagtatcctgggaagatccttctacctcatagttttcttttcagactgaacacagatgtgccaaatactgttaataacaagtaattatcccttgattcaagccagaacatttcaggagctgacaggatccagaaccatccttctagatttgaccaggcataattacactaaatgtgcttttagtgatattttatcatcaaggcttttttcatattattcagacttgagcaaacattactgaattttctcaaaagaaaacacaaaataacaatttgaagaattttataagattaactaatactctgaaattctaaaggaattaaaaatattaatcattaaaaatatataattttaaaaaaagaaaaaaaagaaataaaataaaaataaaactatataattttgcattcattaagaccaactaaatttaatcaacagtttattcatgtctgtaacatgattccctatagaagaaatgaagtatgtataagaaaagaaatatggtaaaatatctctattcaaatgaactacagtactaaaagttttattatatactgtttaatatacatgcatgagtgaatgtactacagtcagtatttacaggtcagaaatgagattaagtcttacctttaaatgtgacaaacagttctgtaggaaaatatgccagttatttaaaaaaaactgtttctgactgacacataaaaggcaggtaattaatggatatagagcctaaaggagaggaagaaacagaattaagatttttcataaaaagggcagcactggacttgtcaattatatttcattcattctaataaaaaaattctattagcatttttctgtttgtaataaaaaatacaatcagggaataatcaaagaaatgacaaagggcatttcttctgtaagaacaatttcctgacctatcacctctccccaagttagaaatatgctgttatttctccctagacccagtactcctctaactagaacagcggccctgggggtcagagcacagaccaacgttaacgtgtcagctttcaattcatcaggtgactttagggagtgtgtgtgctccagtcactcggaggatccgttaaagtgttggaggtccactttcctaacgtgaaaagtgaggatgctcatcacacatatcctacagggttctgaggcataaagtaagatacagcgtggaaagcactcggcttagtgcctggcacagtcactgttgattattactatacctctatcttaagtggtcaagtactcatccactatttcacattttctccaagctgcatacaaatttacagaaaaatccctcaaagttattgacgtgtacggttaaatggggaaaaaaatcaccttaaatttctgaaaagagaagatgtaattatatagagaatcacatgcttcagaatacaacttattatgatgtaaaattggacttccctggtggctcagacggtaaagaagctgcctgtaatgcgggaggcttgggttagatccctagactgggaaaatcctctggaaaagagaatggcaacccacttccgtattcttgcctggagaatcccatggacagaggagcctagcgggctacagtccacgggattgcaaagagccaaacacgactgagaaactaacactgacttctcactacatttaaattttcccatattctaatacgggtttcacttgtggttcagatggtaaagaatctgcctgcaatgcaggagacccgagttcaatccctgggttgggaagatcccctggagaaggaaatggcaacccattccagtattcctgcctggaatatcccacggatagaggaacctggcaggctatagtccatggggtcgcaaagagtgagacacaactgagtgactgacactttcactttacatattctaatacaaaattcaaagcatctgtcaaaagctagaataaagtttgaataacctactaaatacagagctaataaaattaagaatatacagttttaaaaagagcaggagaaaataggtaaaatttcctcttgtgtttacactttggatattttacaatttgaatttttataattctctttaaattctactaaaaaaaactctactaaattcataaatcatttattaaaattctaaataaatatgtgaaggtttgaaatgtttctcataccaatgaatgtttctttctggaactcagttcaaaagtagtctgataaagcatctccacaaaatttttcaagcagggaacattcacttcgtttttcacagcctaggtaaaaagataatacaaaaacaaagaaaatggttacaaacgttagatcaaactatacaggatcacaaagaggttctgtaaggtttgaaattggttaataattctctgagtatctaatggaagttccgtaaagtaaataagacaaaccgggtccctgccctgggtgaacaagcagagactagaggcaagtgaacagacaatgaatatgtggtacaaaaaacgctctaagagaaaattctgtgtgctcttagggcactcagaatggaccccaatgaaaaactccatagggaagtaacatatacactgaatccagcatttccttgcctaaaatacgatcgcatcccacgtaacctctctgaccttatctcccactgccctggccctgcactgggatccagccacactagcatctctgttattcctagaacacatcaaacatgctcttgcttctggatgactgtgctggctccttctgcctaagaaagtctcccccccaaatctggtatgccttgctcctgcattccttcagtttttggccaactgttatcatccctttcaaggtggcggtctttgctgaaagtgaaagtcgatcagccgtgtccaacttttatgatcccttggactatagtccatggaagtctccaggccagaatactggagtgggtagccattcccttctccaggggatcttcccaacccagggattgaacccaggtctcccacattgctggcggattatttatcagctgagccaccagggaagcctgatctttcctaatcattctatttaaaatttcaactcccctacccactgcagcatttttagggccctaccctgctttacatttctccatagtactcaccaacatatctggcatactgcatattgtacatattcattgactgtgagttagctgaactggatgtaagatatataagagtaaaaaagtcttacctaccctgatcattgttctactctgtgtataggagaggccctgacacacaggaagcactcaatacagataatgaataaataagcagaggtcaactaagaaaggaggctgggggttattagagtggtaagaatgttccagacagaagaagctccatgtacagaggcaggtgttatgggctgaattgtcccaaaattcaaacactaaagtcccaaccccacatacctcataatgtgaccttataagaaaatcattgcagatatagttagttatatttgcaagataaggtcctactggagtttgtgtgtattggcgggggaagggggtgtgactccaacatgactagtgtcctcagaaagcgggggaaatgcagacatagacatgcacacaaggagaagcccatgtaaaaatgaagcacagatcagggtggaacttctacaagacaaggaatgtcagagattttcagcaaactaccagaagctaggtaagaggcatggaacagatctttctcacagcactcaaaaagatcaacctgccaacactttggtctcagatatctagcctctataactgtgagacaataaatttttgctgtttaagccacctagtttgtggtactttgttagggcaatcctagtaggtaaactaaaaaagtaaatatggcattaaagaagaactaggcaacagtaataacggaccacagtcaaaagtctttcttcccacaatctgctcctcttgatgaactgccttgaaaactacagcatactctcagatacctggtaaaaacagattttcagacaaaggggaagcacacatgacaattcgggatggataagcagtaactcaaatcacttctaaggaacaaatatctccaaacaggtaaatacacaaccgaactgtgcatccatacaatagaatactagtcaacaatgaataaactgctgatacattctgtaacatagctggaactcaaaataattatgcagagcaaaagaaaccagaaaagagtctgtagtgtaagattccattagtataaaattctaggaaacccaaaactaagtagaggaatagaaagatccatggttagatctgagaaaaatgtgggaaaaaaaaaaaagaaaaatgtggggtgagtggtagtggggattaaaaaggagcatggagacatttttggaggatggtagaaatgtacactatcttcatcgtggtgaaggttttacagacgtatacatatgtccaattgtacaatttaaatatgtgtagtttaagtcaattttacctccgttaagtttttaaaaatgaaatatgtgtgcgtatgtatataaagaatatcattcatacagcagtacatagtaaactgaaagtaaatagcattatcacataccacacacacacacacaaaatccacacaggaagcaaaaaaattctagcatgttaagtattcgaaaatccctaaatcctgtttacatcacattatgttatagtgtatgggcttccttggtggctcagatggtaaatctgcctgccatgcgggagacctgggttcaacccctgggtcaggaagactacctggaaaagtgcaaggctacccactccagtattctggcctggagaattccatgaactatataatccatgggctcccaaagagtcggacacgaccaagggactaatacgcacacacacattagtagtaacgacaaattaattttgagaaatacaatggatttagaccaagaaaagctttcataaatctgtttccctagaagttaccatgatgatgtttataataatcatattttctaaataacttaggatacatattttgacaggtatgatgaatgttatggcaactacagaaatgaacatttaaaagtgagacagtcctgtaaaatctaagatatatgtcacagtacttttaaattcttcagaagcattaaaatggcagccaccttgtaaggagcaaatgccattaaatgcagtgtgttatgctgagctacttgagataagcattacttccaggttgcaaaaacactgcctgttaatggtctctaaatcttaagggcctgggcttgttcttttaattaaaagactgatcagtgttctgctatttgtttaatgaagatttccctacacccacataacattccaagtttccactttattgtctacgagattatgagaaagtaagaatgtatcatctggtaactcttcagtgaacagagactttcaaatacaatgtaaaaataaaaatggacttacagcagctacagggataagaatctccacaaataaaccagcaagtgcatgttttatatctttatcttttacttctaagaaatactgagcacattccttgagaggggaaaaagatatattagattaacaaaggaagaagattaagaaatgataatatcacaataatttcttaaacattctgcaattttattagaaaactaagttcaaattcatgctcaaatttaaaaagaaagttaattcacacttgtgacaatttaacccttggaataaggaattaattcttatcattaattcatatttatcttgtttcttttaaaaaaaagtcatttaaagcaaaaacaactactgttgggctcattccaatcactgcagttgaaaagggtaggtcacctgcatgaattgaaatgatgcttcaaaatcttctacaggatacattttcactcggaaaaacttcattcccattattaagctgatgacgctttgtaccacatgtggactttgttccttttgccgcagttcttttaattctgtcacaaacttcttcctcacagcctgaaacctttaaaatacatggatacataatttgatatgaattaaaaatattcatctcacatgatattaaaggttgaaatcaaaatgggttttacctaaacaccatctcctttctctgccctcatcaaaactaccagaaaaatacagagatgaaaacaaaattatttgttattctaaatttgctattcatttagtttttcaaatcaaaaatgccttagggagaaattctaatttctaataagaattaggaattccatattagaattagaaattcttattagaattataatttcttattgctgtaataccatcaatacaacactgctgctgctgctgctgctgcgtcgcttcagtcgtgcccgactctgtgtgaccccatagacggcagcccaccaggctcccccatccctgggattctccaggtaagaacactggagtggattgccatttccctttccaatgcatgaaagtgaaaagtgaaattgaagtcacttcagtcatgtccgactcctagcaaccccatggactgcagcccaccaggctcccccatccctgggattctccaggcaagaacactggagtgggttgccatttccttctccaatgcatgaaagtgaaaagtgaaagtgaagtcattcagtcgtgtccgactcctagcgaccccatggactgcagcctaccaggctcctccgtccatgggattttccaggcaagagtactggagtggggtgccattgccttctctgcaatacaacactactaccacttattaataatcatcataaaaataagatctaataacccacccataaaacatccatatgtaaatcagagagtgtctctaaattttaaggttcctttttaatgaagtctgcgatctgagtgacaaggagggaagactgaagctatatatttgtttaatgagataaagcaatcaactgtagactactaattatcactaaaaattattatcttcttacactgtagaaaaactgagtaagaagcatggggggacactggtctcacaatctgaaaaagctagagaatcacaatgctttcaaaacattgagcaccatcttggattcaaattaccccagttgttaaggctactaagtttttctttgtttacattgcaaaaagatatctgatagttcattaatcaataatacttcatttatcctccatatattatgaaacatatatattatgaaaaatacaataaacagattgcttatattaagtgaagaatttactgttaatattacttggggaaactagttcttgagagttaaaatgacaaagcatactacccaatggtcactgattacatattaatattaataaatatagatattaattacattttaatgaaatatggacatatgataggaagtataacttatctatttccatttcagtcttggagaatacaacaccattttccatgaaagtattcttttacattttacaaagaaaatataaagtgaataaaattcctttcattgcaataatattagaatctaaagattttcttctgtcattaaatttctcataataattatcagttactataatcaaaggaaatgcatagacaagattctgaaacacccctagcctttctctttctcctcactcctttcccacctcaccacctttcctttcaaatggtggtgctgtcagcccaaccaaatgcggatgtgtccacgtcttttctcatgctcactggatgtgagggtggaaaacatctcattactgctcgagtggcatttctctaacaactagaccagcgagtgtgctcaatcgctcagtcatgtccgactgtttgtgacccaatggactgtagctgccaggctcctctgtccatggaattttccaggcaagaatactggagtggattgccatttcctatgccaagaccaatgagactgagcaacatttcatatatttaccttatatttactatcctttactataaacatttttatttactatccttaccatattagatttaacttagctatcacgtaaggttcttctggatccaacttgttcatgtattatttagcatctcctgatagaaaatcattttcattctttatataaatttatttattttaattggaggctaattactttacaatattgcattggttttgcatacatcaacatgaatccaccatgggtgtacacgtgttccccatcctgaaccccgtcccacctccctccccataccatccctctgggtcatcccagtgcaccagccccaagcatcctgtatcatgcatcgaacctagactggcgattcattccatgtatgatattatacatgtttcaatgccattctcccaaatcatcccatcctctccctctcccacagagtccaaaagactgttctatacatctgtgtctcttttgatgtctcacatacagggttattgctaccatctttctaaattccatatatatgcgttagcatacggtattggtgtttttctttctggcttacttcattctgtataataggctccaaataaaaaccaaactatcatgaactacagggccataaaaagaaatatatcattgctcatgttttagtagttatattcctgagacagggattcactgttgattaaatataaatgcaatattaatatattattgtctaagtcatttcaaatactccaatatattccaagttctatagcactgggtatacaagggtctcataaattacaaaggataaaaaaaatactaaattaaaagatgcatgcacactaagtcacttcagatgtgtccgattctatgtgatcttaaggactgcagcccgccaggttcctctgtttatgggattctccaggcaagaatactggagggggttgccatgtcctcctccaggggatattcctgactcagggatcaaacccacatctcttgggtctcctgcattggcaggcaggttctttaccactagccctatctgggaagcccaaattaaaagatagtaaatactaaataaaatgcattacttagtattaaaatctaaactactaaatgctaacaataattgtgtttgctcctttagaatttaaagattgttatataatgatttcagggccaaagactgactctttaaatagcacccaagaaaatctaaactgacccattctgccttacagatttcccaataggaacaaaggcaattcaaaatcttccacagtctttagagtaagcacaagatatgaaagacaagcatcttttttagtgtttatgataattatggttcaatataatcaatgcatgtaactcctaatgaatgaccctttttatggagcactctagtatatcttatcgtccctttttggtatgtcttctatctattcaaaacactgttcagtattaaaacaaattaagatggttagaaggaagacactgcagtgcatctcagagataaaagcactcaactagaaaccactaaaagtaattattagctttgacaagagttcgaaaaacacttctcatagaactgtgaaacatagggaataaggtaatgacctgacaatttttggcaatttctgacttccttaattcaggttttatggaaaataccaaataaatgaaaacaatttgtagaactgaagtatgggtgtcccttaaaaatcctctaaaaacacagtagcaaaataataaaaagtgaagccaacttcacaaaattccatggaaaacagaaataacagagaaaagtagttagtgtctattctgtcagtcagtaatgaggcattctaaaacatagcaagatcagtgatttatgaaacttactttgattgggcaagaacgcctatcacttctgcatataaatctgcaataatatgcacattcccagtgttggttcctgaatatctaaagcaacaaaaagaacaaacacattatttcattgaattgttctacaaactctcttaataaatctgaaaatcccttatcagggtgttgtataatttttctctgaagattcactggcaggatgataaaaaccacatgaattttctcctatctctacattttaatttgccaggaaatttaacctgattcttaaaaatccaatcaatggctttaagaattatttttacaaaatcctttccataagcatcttgtgtggattaaaaaatataaaggcataactactttgaactccagtaacaaataattgaagaaaattcaaattaacagtctaagtctagactgcagataaaagtaacaatgccataagtattttacttacccttccttatgtttaaagtgcttaaaagctaagtttagaacttcatgaactaagggatcaggcacaggatgaacaggaatctaggggaaaaaaaattgtgtgccaaataggttataagtcttttatgagtattctcatcatttcaactaaccaaattaataaccaattttaactttcatgatattatctactattaatctgtcaatcttccccttttctaagaaggttattatttttctctaagaatttagttgaatacctactttgctgttgtttagttgctaagtcatgtccgactctgtgtgacctggtagactgtagcccaccaggctcctttgtctataggactttctaggcaagaatactagagtgggttgccatgccctcctccagggggtcctccagactcagggatcgaacccacgtctcctgcattggcaggtggattctttacaactgagccactagggaagccttcaacatctacttcaacaagttctaaattgaagaatgttagcttcataaccacaaacccttaaactacagactatgcagatgaaaaaacagtcattgttgtactattctctatcagaaacttaaaaacgcactccagggtaactctctgtgacacctataggaaagggagcttgattgagccaggtccatattccacatagtctgatattctaccataatagtatccaaaaggaactccaacttcaagcaatttaaaattagttatggttttactagtattagaaattgttcatttaaatgtttgtttcatttagttatttaaaaattacatgttagttccgagtatggaaaacacatcaaaacattaaaaccagaaagtaaaatccctaccccttaccccatatataatcaccactggtatatatctacttgcaggttttttcctacactcacccacccacacaccttatttttacttaatggaatgatgcatcttcccctgtcattactgagcactccttacactatttagcagccatataaaactctgcgtatattataatttatttaatgagctccctattaatgaacatttcattccagacttttaatattatacaataaacatcttatgtatttagtattatttacttttatagttccatgggaaagagttcaaaaggaggaactgatgagttaaagattatccaagtcatcatttacagagattctagttctttatatgttgggggtctgtttctaacctctctattccatcaattaattcacacctatactaaaatcattctgtcttaattataagagcttactactagattctgatgtctggcactgcaaggcctccctatttttcttccacaacagcttggctattgttctttcctattcaatttagagccatcttttctaggtccacaaaaactgtctgttacagatcaatttggggataactatattcttatacatttgcatgaaatatcttcccacttctttaaagactttcaggaaagttttacaattttctgattttgccttttgttattcttaagacaataaacatatgaagagatgcttgctttcatcagtaataagaatgaaaatacacaattcagttcagtcgctcagtcatgtccaactctttgtgactccatggactgcagcacgccaggcctccctgtccatcaccaactcccagagtttactcaaactcatgtccattgagtcagtgatgacatccaaccatctcatcctccgtcatccccttctcctctcgccttcaatctttcccagcatcaggatcttttcaaatgagtcagttgtttgcatcatgtgggcaaagtattggagttttagcttcagtgtcagtctttccaatgaatattcaggactgatttccttttggatggatctccttgtagtccaagggactctcaaagagtcttttccaacaccacagttcaaaagcatcaattcttcacaacaaactgtggaaaattcttaacgagatgggaataccagaccacctgacctgcctcctgagaattctgtatgcaggtcaagaagcaacagttagaactggacatggaacaacagactggttccaaaccgggaaaggagtatgtcaaggctgtatgttgtcacctcggttatttaacttatatgcagagtacatcatgagaaatgcagggctggatgaagcacaaactggaaccaagattgctgggagaaatatcaataacttcagatatgcagatgacaccaccctcacggcagaaagagaagaactaaagagcctcttgatgaaagtgaagaaggagagggaaaaagttggcttaaaactcaacattcagaaaactaagatgatggcatttggtcccatcatttcatggcacatagatggggagacaatgaaaacagtgacagactttatttggggggctccaaaataactgcagatggtgactgcagccatgaaattaaaagactcttgctccttggaagaaaagttatgaccaacctagacagtttattaaaaagcagagacattactttgccaataaatgtctgtctagtcaaggctttggtttttccagtagtcatgtatggatgtgagagttggactatatagaaaaaaaatacacaaggtatcattttgctcttacctgatgggaaaaaaactaagcctgacaataccaaattgtagaaataaggtaaatgaatgagggctcacaaacactgctggtcaaactttagatcaattttttacatagcctgcaatctagcaaagaccccagtgtgtcaccacaaaacatggcccttgggcataaggattgttttaggctgaaggcaagagagaaagaacagacgagggaaaggactctgttcctcctttctccctaaaagcagcctcctctcttccttttccctaaccaagaagaggacaaaccactgtcactagaaacacaaaggaggcacagagatggagctgcacaaagaagccttactaagtagtccttatttcccattggcttcccccatgtgtttaccttcccatggtttaccatctctaggagcccactctcttttccctgtcttgtcacttctccacaatgtactgatctttgttaaaacaggttttcgggttgaaccattctttgagtcttcacttcttttctgcgaaggcctcgagatgtatatgtagtaaaccttttcttctactaagcttacttctatcagtttaatctgtaggccccagctactaaacctaagagggaggagctccattacactagcagttacacacattataagaaaataaggatgtttagctacatacttcataggatgataatttatccagtctgtgcatctcagggtccaattagaaccaaatgcacaggaattctttatgtttgtttaaaattctaccagctgagctaccagggaagccttaaaattgttaataatatagtttataaaacacctcatcagtaagatgaaattgtaataaagattaaatataaccaagaaagtcacaaactagactggggataaaaaaaaaaggattatagctactcagagattatcacaatgcttctcagggattagataaagaaaagatttatatttacaatgaagataacttatttcttacaaagattaaccatgtgcttatcaggaggaggctgcatttcagccttaataatgatcaagaactagttcaaaagtggtggatacaagacagacattagataagaataaagatagttaaattacaatgatgggcaagaaatccagtaaggaactattagtttacatttactcactttaaggagaaggtgaccaaattcacaccaccaaagtaagtagagcactgggatttttttatttttttattggaatataatgttgtgttagtttcggctgtacaatgaagtgaatcagttatatgtatacatatatccccttcctattggctcagatggtaaagaatctgcctgcagtacaggggacctgggtttaatccctggatcagaaagatcctctggaaaagagaatgacaacccaccccagtattcttgcctggagaattccatggacacagaggagccttgtagctatagtccacggggtcacaaaatttggacacaactgagagactaacactttccctccctcttgggcatccctcccactctaccaacaccctacccttctaagtcatcagaaagcaccaagctgagctccctgtgctatacagcagcttcccactggctatctattttacgcatggtagtgtatatatgtcaatgttactctctcatttcaccacacagtactaggatttttcaaacactgtctcaagcagacggaggcacagcagctgacatggctctaagaggcttgcggtgaaccctgactccagaaccaaaggctacagccaaatcttggctaagtggctcagtgtttactgttgaccagaagaaatcagaaagaacatgcatctgaaatttcctagaaatgggtactgtcctaaaagcctggacttaaaattcaattagaagaaaatgtactctgagggacacccccatgctatccatcatataaagggctgagtaaccagctgtgaacaaaatctttcaaggtctcagataaccttttaaaaataacctgaccttacaagaaagaaatgaagtttatgcatcagtttgtagaagctgagattttcaaataccatgctaaaaactgtgtgactgcatgctaagttgcttcaatcatgtctgactgtgcgaacctatagactggtgcccacaaggctcctctgtccatgggattctccaggcaagaatactggagtgggttgtgatgccctcctccagaggatcttcccaattcagggatcgaacctgcctctcttacatctaacctgcattggtaggcggggtctttaccactagcccatggtaacaacagaccaggacctaaatttattctacatagtaaagtcagagagctcagcctccagaacagtcttaacctttctctcccattggtaaactgaaattataaacccaaaattcctcttgcaattagggatacttttaagtaggaattttatgactgactgcattataagaagctttccaatcttttataggcaaacacatcccaccattaaagaagcataaggttaataaccacatctcactgatataggaattttggaatattggctgggctattaagtatgatcttggcatggtaatcttttacgtggtaccttgagtacttcttcttagggctccacgattcatctcatattaacaatttattgaccagagacatattaatattcacttatataatcaaactgcagaacaggagtttgcttctgcaaaaatcccccagtcaataacaaaacaaaagaagaaactaaaaccagtaactccaaaatgctcccttaaattcacaccaagctgctcaacttattataagtaaattataatcaaatcattttatactattgtaaaatattttcttcattaaagtgataaaagatatctttctacactttttatcactctaatgaagaaaagctgagcttttctattcactagttatataatctggaggaagtttccacttttttacctgtgaaaattgcagataatagattagagcccgtaattaccagaacagagatttaaaaaactgagagaatgcattacaataggagattgattcttgtccttgcactttttctacccttctataaaaaggactaggacaaaattcttacctcctaggaaggtagggcagatgagggaactagaacataggatggagacaccgaggacaaggccttgtagggaaaaatggcagtaatccagagttcattaggaaacagggaggcagatgtattctcctagccagatcttccccagactgagccaaacaaaatatgcccaaaggtaactaaaaggttcctgaagtcactgctattgtcccctatgtcccagttgttgttatacagttactaagtcatctccaactcattgtgaccccatggactgcagcctgctaggcttccctgtcctgcactatcttctggagtttgctcagattcatgtctattaagttaatgatgctatctaaccatcttatcctctgccaccctcttctccttttgccgtcagtcttttccaacatcagggtcttttctaatgagtcagctcttcgcatcaggtggctgaagttttggagctctggcttcacctttggtctttccaatgaatattcagggttgagttctttttgattggtttgatctccttgagactctcaagtcttctccaacaccacagttcaaaaccatcaattcttcctcaatcagccttctttatggtccagctctcacatttgtacacgattactggaaaaaccacagctttgactatatggaactttgtcaacaaagtgatggctctgctttttaatatgctgtctaggttggttatagctttccttccaaggagcaagtgtcttttagtttcatggctgcagtcactgtctgcagtgattttggggtccaagaaaacaaaaattgtcactgtttccacgtttccctttctatttgccatgaagtgatgggactggatgccatgatcttaggtttttcgaatggggagttttaaaccagttttttcaccatcttctttcactctcaagaggttctttagttcttcattttctgccattaagtcccagtaagccatctgattaacccatcactggttaaaacaaagtagatatctaccactaggtgacgccaacctttattcgggaatgggctgtatatggatcaagcagcctgactcccagaacttcctgtagagctcacagcgctaatcatacaggttggagccagacacatcagtgaccttgcaataatgcgacactacatttgacaggaataaaatttcctgtgccccactcactgtgcggtggtgtggttttaccataatgacttcctcacagggatgtctggtgtgctctaggccagagatatgaaacagaagctaacttatacccatgctttctcttacatagtctttactggctccaattatgccagaagtccaacagtgacagctgggcacactatttggccatgttgtgtgctctctcagttcagttcagttcagttgtccagtcgtgtccgactctttgcgaccccatgaatcgcagcacgctaggcctccctgtccatcaccaactcctggagttcactcaaacttacgtccatcgagtcagtgatgtcatccagccatctcatcctctgtcgtccccttctcctcctgcccccaatccctcccagcatcagagtcttttccaatgagtcaactcttcacatgaggtggccaaagtactggagtttcagctttagcatcattccttccaaagaacacccagggctgatctcctttagaatggactggttggatctcgattactaccttaatactgaactaccaacactttccaagtgtctgtgtgctgggtatttgccaggcattttatatacattatttatgacacttatagcaaccttacatggtagtatttgacccctgttttgcagatgagaggactgaaatttagaagttggagcatacgtctctaaaatatactgtgtgcccagcttctgatcaatgaaaatacatttaataaatggaacaaatgaggaaaaaagctttcagttttatcacactgtagctagaaaagagacagagaaacagaagtgagagaagaaacattatctcagttttaatttttataagaaaaaaagcacaatctctaaaaattttaagaatggacactattagaatgctcagacagtcttgaaatttctacttttcccccttgcttacaataacaacaacaacaaaaatttccaaactgaatttccaaaaaggggggtggggggtggggcggaatcctatttcagtttatagaaaaaagctctatttcatggagtaaattaatagcctcatctatagtatcaagaatttttcaaatcttgtcatttgcatgactagaagcagctcaaattctacttgaacattcaagaaggatatatcgagtagaatctaaagaatactcaagttttattccaaagctattccctaaatctaatgcttttagcacatcatgaaagtggaaaaccacaaaaccaggtaagatatatatacctgagagtcagcaaggttcattcattatgtaaatgaccagtcctcaatgaaaaagtgaataaactcatgactcagcaaaatcacaaataacatcataacattcagggctgctcactaacatctaaaatgtcaatgtgaaatctgaaaatcctaaggatctactactccaccttctgatacttcacaataaggattgataagactaagccaaaaatttgaagtggctcataggcctgggtttcctaatcttgtctgtttcaatgaacaaatgtatggctaaaattcagtatgaaaaaaaaatttcctcaaacattctaaatgctacactgctgctgctaagtcgcttcagtcatgtctgactgtgtgaccccatagatggcagcccaccaggctcccctgtccctgggattctccaggcaagaacactggagtgggttgccattcccttctccaatgcatgaaagtgaaaagtgaaagtgaagttgctcagtcgtatccgactcttcgagaccccacagactgcagcctaccaggctcctccgttcctgggattttccaggcaagagtactggagtggggtgccattgctttctccgtctaaatgctatggtgctgtttaaatatgctttttatcaaggattctaaagcctctggtactaacattctaacatttgtagttggccatgaccccaaaattattcttctgactttcttgaaaaaataaaattagtcctttatcatcttgatttaattttgttcccatgatgtatcacattgatttaaccagattttttcccatcacatttatataatctcaatcctttgtctaacttatgatttaaactttaattttataagatactggtcatttcacctaattttatatcactgattttaccaataagaatagttttatttaaaaagagaactagctttatcatcttcagcaaatcattgtaactaagaacatttatctataagataaaaacaacagatagcatttattggacacttcccatgttcatattattgtatctaattattgtatttaattctcatgattcttttatagaggaggaaagaaatcagtgagtaataacttgtccaagttacaaagcaagtaaatgacacagctgggatgaaaaaacatttccaaagttcatcagaatgatcaggtggtggagaaggaaatggcaacccactccagtattcttgcctggagaatcccatggacagaagagcctggtgggctacagtccacagggtcgcaaagagtcggacatgactgagcgacttcacttcagattagtggttagagaaggggcctccttattcccattttcatgatgacctagtttctacttaattgacctaatgaagtcataaatttataatgacatgaattatagtaaacaatagaaaccacccacttttgtattatactatcaaatagaaaacgatgagatagaaaaatctaaattttaaatggcttagaaaatgttcagattatctttaaatttctaaatttcatctaatttctaaaacagaaaattataggtgaaaattgtaggtgactcatacatccgttactgtttttcaaagtctcaagtttccttttaatatatgtatttatttttgttaaagcagctattttccaacctgtgactttggagatacacccataaaactaatatggcatcagggttattgaatcagctttgggtcccagaagttgcttcagatgtgcacgttgtcaattttattgtatctgtagaatataatttttgttttaaactgtagttttctcagaaatacttttcaaagagtgaaaaattccaggataactgcttctgtgtcaattacacttgacacataactgcacaaatgaacaatgtacactattagttgtacattaacttacatgtacgactttcggcatctgtgttcacaaatgcatgtttttgcaaatcaccgttatttataagtgacaataattgaggttaaggttacaaagaaacctgcatttgtagtccagagttttaagtggtccataatacaatgtacggaaatgtgaaagacaattttgtatatttgtttgttactaactcagatcattaaaatgaaaacaattttttaaacaacaacaacaacaaaaaaaaaagatcaggtggtataagggatacagagctctttgtgtattgtgaagagttctaaatatgtgattatgacacataataacatgtgataacgacatgacaaattaataaagaaacaaacaatttgtaatatatgagatcaagcactaactcacaaacaacatgtactcccctttcaagactgacccaaccatgtatcgatatttcattacactccaggttactcctggagccatccatctcatcaaaataaaactgaatcacatgttaatacatatatatcatgtgggacaaaagtaatagtcatattaaattcaaaatatactaccattgattactctctgaatctattaaaccctacatcattttgacacagaaaaaaattgggttcatttgtcatgatagttcagaaagttctatttttacttcatattctgtagttgcagtaattttgaagaagctaaaaagacttgcattttactgggaaagagaaaacctatataggattttaaataatgaacatcaaaaagatgcttgttccttgggagaaaagctatgacaaacctagaaggcatattaaaaagcagagacattactttgccaacaaagttccatctagtcaaggctatggtttttcctgtggtcatgtatggatgtgagagctggaccataaagaaagctgagcgccaaagagttgatgcttttgaagtgtggtgttggagaagactcttgagagtcccttggactgcaaggagatccaaacagtccattctaaaaggagatcagtcctgaatattcattggaaggacagatgctgaagctctaatcctttgcccacccaatgcaaagaactgactcactggaaaagaccctgatgctgggaaagattgaaggcaggagaaggggtccacagaggacaagatggttggatggcatcaccaacacaatggccatgagtttgaacaagctctgggagttggtggtgatggacagggaagcctggtgtgctgcagtccatggggtcgcagagtcagatgtgactgagtgactgaactgaactgatgcttttggtatatgtttctttgatgagtgcatttgaatgaaaatatgaggataatggtaaaagagaaaaggggtataagtacaaaagaaaataatataacactgtaaagaaactgtactccaattaaaaaataaaatttttttaaaagaaatgttaagcagaaagggaactataggttagaagagtatgataaaagaacccaaaccaaggatgagctatgagaaccactgtatttcccctttttatactttgtgagtccacgtgaaccatggatatgaaaggattttgtgcagaggactcgaaaaatgggcctgaaaggattttcttaggtttacagacttcgatttttttttcccctactagaagagttatctggactattagattttttaaaggagcagaaggaaaaggaagatcaagacaaagacaacagggaagggtaaaaggacagctgagaaggaagggtaaggggagaaagaaaaccctccaagggcttgtctgtgcactgaagttctgaagccagtgcaattataggtaacttttagatgagaagagagaccagttgctaagtggaagaccatcatggcaaccaaaggagaaaaggcataaacgagtcagagatcacggaggggcctgaaagtcagtgcacgagtttgcgatttctttggctgggagaagaaattcctctatcattcaactaagaaatgcaaatactgatgactaaattcgtcacaagatctacatttagcatgagatcaaccttgatggggcttcccaggtggagctagtggtaaaaatatgcctcacaatgcaggagacataagagacttgggttcgatccccggctcaggaagattccctggaggagtgcatgacaacccactctagtattcttgcctggagaaccccatgcacagaagagtctggcatggtccatggggtcacaaagagtcggacacaactaaagtgacttagcatgcatgtaactttgatgaacgcaaagcccaagtctgttcatggtatcatgcttctggtcctcagctccttctatatctctactgacttcagccctaggatctaggatccagctaaactaagagatcacagaaagcaaatctggctttcagaaagcacaactttcagaggaaacttctttcccacattgactaaataaatctttatgaaaggtacaaattaaagtgattttacctttgattaatgcgtttatctatttcacatattcaaagttattaaacttttattttaaacaaaataaaacataagaaaaatgtatttttatctgtgggtttcagatattcagatttcaatattttttcacatacattgtaaaaacaaaggcaaagtacacatgattacacaattcaaatatttttatagtggttatgtcaaaaaaagactatcaaatcaattaactttttatatcttacacttgctttttcatgtcatattaggtattctattccattttatacaacaaaaacaaaactccctgtccaaacgtgtcatatgcaaaatatgatttctttttcttttaggtgacctgatttttttcttttcccaaaacattacagcatgcatggctggaaaatacatgggtcatctttgaacgctgtataagtttttaaagaatacaaactatggaaaacatactttcacatcagtacaggcacttatacatgtacttgtacttatcgtgaatagtaaaaatatgtgtaacatgatagctgacactaaattacatatttatatcttcactatctatgtcactgagatggtgagctcagaagtgcagtacctagaacaataccacccaacagtagacattctaacacttattgaatgaatgaaagtgaaagagaaagtcatgtccaactctttacaaccccatggactgtagtccatggaattttccaggccagagtactggagtgggtagccttcttctccaggggatcttcccaaaccagggatcaaatctaggtctctcgcatttcaggcagactctttactagctgagccaccagggaagcccaagaatactggagtgcgtagcctatcccttctccagcagatcttctcgacccaggaattgaacaggggtctcctgctttgcaggcacattctttaccaactgagctatcagggaagcccgttgaatgaacaaacataaataattcattatcctgaaaatcatttgcacttgacagttcagatcacccccattgctcaacaatcactgcacaattattacatgttgaaatgcaggcttgagggctaggaagagaatttctttaaaagtggaggtaaaaaggaactgaagtaggtaaatgacaggcagactatagtgacagctaaaacccatatttaacacagtttctattcagctccattttactaacatgatttcatgtcttagatggcaaatgaaggtagaaagaatagggagagacaggtacaggacatgcaatcctcaggcaattgaaaggcataaaattaaattacaggaattgtgtttctgtgagccagaattttagatataacatcctaaattaggtaactgaaacatgaaagcaaatcagtgaaaaataagaaatacagactttgcagaaacaaaatagcttacctgctttagaacttcaactaaaactagacaaaaaatgaaatctactgctaagtctctcctttcaagaagatagtctctttcacgttgctgttcatccctgaaacaagaatctcaaattaggattacgttatgaaaagagctcttggttagtatttcatgttatttactgaattcctagtacatatggtgtttcatggcaactgttaagtttttgtaatcacccaacatatatattgcatttcttgtgttctcattttgtacattaggaacttacatgcaaatctcactactacatctgtcagaaattaaacctaatctaaaagaattagagggactttctggtggctcagtggttaggactccatgcttccagtccagggggtatgggttcaattcctggtcagggaactaggatcccacatgccaagtggcacagccaaaaaaatgaatagaatttataccctactgttgtgtgaaaattgtataaatcttaattatgttgaataggttcacagagcttttcaggcctacgatatccttctacttctctgtatattcattctgttaatttttagagtttgatattgaaactccaactaaaaatcttatctacttcaaaaaattattgtaatatataatggaacgatatataaccttgttctgtattttccaagtctcctgtaagtgtgttatcatatgttcataatttaaaaaaaataaaaattaaacatacaaatggaaaatttttaataaataaaaccatattttaaaataaataaaaaactaaaagaataagaggaagaaaaatatgaaaatacagtgccaggtcattttttcacaaatctaagttggaaaatcccaagtggcatctgctgaagtccaattctaaaccacgggccatcatctgaaaacaaacatgttttacttaaatccatgatctccctgggaaatttgaagaaaagaaaagacaagttcaaggatttaactccaagaagagtctcaagtgtaagaatataaggtttgagcagtcttccaatatcacaattgtttcccttcacaaaccatacgaacaagactttctttggatatttttctaactttgctgatgactgttaagctcctcattgcaccacagagacagctttcttgaaatgcattttggcaagactagctccagtggcgactcccgtagggcggcacctactttaactgctaccttcacttgattcacagtttaagtgtgagcatcttttccctctgttacctgttccacaaaagtaaccaaacaataacaatcatcagctgataacactatagcctcttcattggaagtacttcaagcccagacagaaaagtcaaaaaatgtgccacttaccccttagattttgtgctagaccgaggcctatattcatacgattcatcttcagttccgttctggcgtttgtaccagtcaaacaaggtgcggagtaaggaagggagacagtgctctgctactgagctcatagagcttatcaactgaaaacacaagatgttgccaaagataaaatacatcaaagtgccgcgcttctaactctacttgcaatcacttagaaatgagcaatatttctggaataaattaacatgaaacattgtaattcaagagcaataactgtgtttcaaaataaaaataagggctgggagtctagccaagtaataaagtatagtgagttacatttcactgactattaaaatttacccaaatccttgcagtttagttcagtggctttccaccctttacctgcctccatatgctactcgtgtaaaaacatgactgtcagtaacatccctgattatattcatgacacctcttggtgaactgttacacacaacatgaaacaatcacacctatttccttttcctggccagttcctctctactcatgtgaatgaaatgttctaaaatgttaccactagaagggataaagagatgcagaaacagagaagaccataccagttagaactatgggaaaagctccacttgcctctgtgctgctatgacacagaacagagaattataattacacaatttgtgatactcacaaataaacatattagaaatgagttatatacatgcttttcaagctcaaaatatataaatggacagcataaaaataaatggagtgggccggatgcctgccactcaatttgaggcatcccttaaactatctgaactgtaggttagctttatcagattcatttcatgaatgaacccagcttgcctgtaatggtggtaagaggtacaccagctaccattagtcatccgtaaggtcactcttcatcttgaggatccagagaaaaaacatattctcttcataagaaactttgtatctgattcaatccattgttcataaaattagtattttaaaattagcgtacagtgaaacatgcttcactttgtttgagttaactaaacaaactaccggctgcagggatactcaacgtctcactcagttccacaactgtaggaagtgtcagttaatgaagataaatggctacctctaggaattaaacatttatttttcctaatattttaaattttcctgtaacaaagaatgaaacaggttgattgtgcattcttctgtctttttataatctgttcctttaatcacccatttatgatttataaattatcataacctgacaggtgaatagtttctaatctagaaaattaaaataaaaacaagattctaattttatttaaacattttgaaattttatatttcattaacaatgaatactatcaatcaaaggaaatctcttaatatttaaagaaggaacaataaaacatcatctgctactgtaaatatataaaagcagtttatttcacacatagcttttattgtaaaaaagaatcaagctattgggcatgataatttagttttattaatcatttacataagaaaagaaatgaaaatttccttaaaatatggcttaataagtttaaaattctgatcattcattcatcattagttaaatagattcaagatttgaataatctaaaatactttagattacctttaaaatattagtaatacattaataataactagtacttagcatcttctgttatggcattaacatttgaaaagggctgtatgaagtgatcttattattaccataacaaaagccttcttatttatagcttcctcttagaccagcagctatttactaagtgtatgcatcagaatcacctagggagttattgtaaaatacaggtgccagagcaccactcttggtcagcagaactggagcaggatccagaaacacagtattttggtacgcctccaccaagtaattctaaccagtcatctctatctagtcaagcagactaacacgagcattaacttctatttcctagatacctaattatgggaaaagtagctcaggaatactaggtggcaacagaaagctgatctcggttattgagttttgcagacaatcagtatatggaaataattattgagcagacataattatgataaaaataacacttgatcaaatattcaatattagcaagaggaaagaactgacattagaaaaataccactaaattttagatattagtattctttataaagatttctggtttggggattattttggggttggggggggtagccattgtatattttctttttaagcttctttggctttctaacgcaggcattccccttgatctctgcacaggcacagctacaagtctgagtacagggggtagtcagtgcctcctaggacaacccacaactgctgcagaggggactgcagataaatgctgcagccctccattcatcagacagacaagtatgggcaacattctcgagagctctcagaatggaatgaacccccagtgcccagagcagtgatctctatcaattcttccttttcccctgcatcactctctcaagtctcctccctagaatctctttctagaacccagtccttgtctctggctctgcctttagaagggggtggaaagggagaaaaccaggctagatgcctcaatataaaggttctgaagccccaacaggaaaaacagtaaatgttaagaggtcaaatatgtaaaattgtatacaaggaaagattgagagatataattggaaaccttctgaaaattttcaaagggcacagtaaagagagtaccaatgaaaagcaaagttttaaaatatttaataaacagatatcaataaagtttacagctcataactcattctatttgttttgttaaaaaacaaactaccaaggaattccatggcagtccagtggttagcatgccatgcttccaacgctggtaacctgggtttcgtccttggtcaggtatctttgtgtgtgtgtataaaatatatgtatatatttatataaaacagactctcagctccagacagaatctagtgtataacgatatatagggccactaatcaaaatatagaaatttcttaatactgggtgtatattggatcagactgttaggataaacattttcttttcaggaaaaaaaaaagaaaaaaaaaatactggcatacctggtcaaactgaagatcttcacccctctgaagagatctagataatggcttctcctgcagttgaaaaaaaagtgtatgcaaaatattagaaattttacatatattaaacagttgagatttataagttggttttgctttctttgtaattaattttcttttgtaattaattagttttaaggaaaggtgctgatgtgctaatacaaacaaaatttaattaatttagaagagcatacacagcgtgaccctttctgttagccttactatctacttttcttgcttcctattcctcatagaattatttaacttactgaatgtgagaggtgtctcagattatgttcaaatctattacaactgattcttttattgagattctttaggatgattttctaaactttctacattaggctttcttattgaatttttacctgaaatatgtatcataaaaaaccaatgccattcttcaactggaatttagaaatttagagagaatttagaatttttagaattttaaatttcagttcagttcagttcagttcagttcagtcgctcagtcgtgtccgactctttgcgaccccatgaatcgcagtatgccaggcctccctgtcaatcaccaactcccggagttttaaatttagaatttcagaatttagagaaaaactgaaattaagaaatttgtatattctgaagctatctatctaagagtctcaatttccttctctcatttatgactcaccttcatgaaaataaactcacaaacatatctgtcactgaaaaattcctaatctaactatcagagaatcatgtttctaactaatttatttggagtcggtaaaatactttaattttatgttgcttgactttcttttttttaaattaatttatttttattgaaggataattgctttatagaattttgctgttttctgtcaaacctcaacatgaatcagccataggtatacatatatccccgcccttttgaaactccctcccggtcccacccctctaggttgatatggagcccctgtttgagtttcctgagccatacagcaaattcctgttggctatctattttacatatggtaatgtaagttcccatgttactctttccatacatctcaccccctcctcccctctccccaagtccataagtctgttctctctgtttctccactgttgcactgtaaataaattcttcagtaccatttttctagatttcatatatatttgttagaatacagtatttatctttctctttcagacctcatttcactctgtataataggttctaggttcatccacctcattagaactgactcaagtgtgttccttttatggctgagtaatattccattgtgtgtatatatcacaacttctttatccattcatccgtcaatggacatctaggttgcttccgtgttctagttattgtaaatagtgctgcagtgaacaatgggatacgtgtgtctctttcaattttggttttatgccacttgactttcttaataggcaaaagatttctggtatgtccttggcacttgagtccttaaatgctaagcacactttggtaattatcttgcagacaagtcttctctctctaaaaccaactactatacacgataaaggagaaggcaattgttgggggccagcgtgaggaactccacccatggcaaaggtcatgaggaaagaggcttggcatacgcaaaggcatgatcaagtctcaggaaaccccctgttcccgagcatctaaccccaaaaccagagtctgttttatgctctcacctacgcctctgactttacggggggctctcccccataaccatttccctcggagaaggagttaacttgcagctccaaggcaataaaaattcctgggcgtgacaagagtgtttcagcttacggactcctctgaaggttatctagcccgcctgtataggttcgtctggccacaggtgattgtttacagcctcccaatctgagaggcacgagatgttttagacttactaaaggcaaattcttttggagagttagaaattattagtatagtgagttggttaggaattatattggtgaagggtttttcatttgttgggctgatgtttgctgctaaatctccatattccctgcccttataatgaatataactaacatataggagaaataagtattaacctttaagcatataggagagataggaattaacctttaagattaatcctgttaaccttgggttaaataaattcctttcttgattgtaactcactacaccctcaccctataggaatgcaactttatctggagggtcgtgcctggtttaagaaaaaacacccttggaagaaataaggtttttggttatcagaaagaaaggaccatagaatgtcagcaggtctcactcatggccagaagatgatgtaatatccctaagacccccgcatgactctgtattcatccctatgtgtaacaaaaggtatataagcaaaccccaaaataaagaaatcggatcagtttccggaaagactgattccaccatgtcgcttctttcttgctcccgtttctctggctgaaattcagcctcttttctccactaattctcctactacactatccgtttctaatctctatatctgtaattaaatatgtatttttccaaagacgccgacgccgtccccccaccttcgaattaccctggatccactggggctggaccccggcaggcaatggcaccctactccagtactcttgcctggaaaatcccatggatggaggagcctggtaggctgcactccatggggtcgctgagagtcagatacgactgagcaacttcactttcacttttcactttcatgcattagagaaggaaatggcaacccactccagtgttcttccctggagaatcccagggatgggggagcctggtaggctgccgtctatgggatcgcacagagtgggacacgactgaagtgacttagcagcagcagcatgcatgataaacatgcaacacgataatgatactgtccaataatacgtatgcccaattaactagctctaagtctcacagcaagttcaagagaacactgcttctgtaagtatctgaaaagtttgaaaattactgagctctcctaatgtgaactgtgtatttgaaacctgggctaggggtggtgtagaagagagaataagctgtttcttcccaacttacttgacttacttgatccccctcacttgatccctctttcactgtaatactatattgaaaggttttcagtaatattttgaggaacgctgatctacatagttcattaccccatagggtatttattaaataaagtaatgaccaagaagactaaaagagagcaattaacttttccagaaacattcacactgttttcttacactcaacatttttcatttctcaataaactcacactttctcaaagatttctgaacatttgataccctcatagagttttccctaaaacaaaaatgagacttagctgttttttacctaataagaactcagaaatgatgcttgaatgcgaaatactcatgtcactatcagttaaaaaacattaatttcttggactccaaaatcactgcagatggtgactgcagccatgaaattaaaagatgcttactccttagaaggaaagttatgaccaacctagacagcatattaaaaagcagagacattactgacaaagatccatctagtcaaatctatggtttttccagtagtcatgtgtggatgtgagagctggactataaagaaagctgagcatcaaagaactgatgcttttgaactgtggtgttggagaagactcttcagagtcccttggactgcaaggagagccaagcagtccatcctaaaggaaatcagtcctgaatattcattggaaggactgatgctgaagctgaaactccaatactttggccacctgatgcaaagcattgactcgttggaaaagaccttgatgctgggaaacactgaaggcaggaggagaaggggatgacagaggatgagatggttggatggtaccaccgactcaatggacatgagtttgagtaaactccaagagttggtgatggacagggaggcctggcatgctgcagtccatggggtcgcaaagagtcagatacgactgagtgactgaactgaactaaagtgtactgcactaaatacagattactaatcaaggactttgtattaacctctcagtttgattataatgtggttgaggacagcctaatcattgctcaagcagatgtactttcaatatgagactttaaaaagataaactatttaaaaacatgcttatagtatctgcaacccattaacatgacaactaaaaagaatacaagttattctcccatccaagaactaactgggcccaatcctgcttagcttctgagatcagatgagatctgggtgcgttcagagtgctatggccatccaaattattctctatattcacatatagatgaatgcaaagacttacgtataagaatatttactgtactatctttttctgctgttgtcttcctggtagctcaaacagtaaagaggctgcctgcaacacaggagacctggattcaatccctgggtcaggaagatcctctggagaagggaatggcaatccactccagtattcctgcctggagaattccatggacagaggaggctggtgagctacagtccatgggatcgcaaagagtgggacagaactgagcaactaacactaaactatctttttttgcagtgacctcaaattggggtaagtcccaaacagcttatccatagagagtggtataagaaaatttatagtattttctctaagtgaagtagtattcaactgttagaaagaatgagacaaacacatatgggctgacaatagaacaatctctgatttttttaaataaaaataggtacagaaaaaatatatgtatataaaatctcatggctgtgttatttttttcttttttacaggtggaaagtgctacagagattgacaaataacagacatgaaaaatagtaaactaaaactatagacagtgattaccttgataaaaaatgaaaggatcactattgttattacataacctttaaaactactttcactttttacaatgtcattattttaaaataacagaatatattaataacgaatctaaagttcacaatcccttatactctaatttgaccctttaactagtatttgtgtgcagggtaccagcagcaacatgtagcttccaggaaaagcaagagggcttactgaaaaacttttgacagtgtaacaatgatactgaaatatttcaataatctgcaactaaacatggccttctgtcctactaaacaatccctattattgtagattaaaaagtccaatgacagagcaaagaaaatacacattatcttagactttaggataggaagctgcaatggaggtggggacttcctaatgaccactgagaagatgacatttgagtcacaatcagagggaagggactgagcttgccatgcaaagtgaggaaaagataatccagtcagtaccttggaactccccaaaggctcaggaattggaggacttcagtactatgaaagtgtggatgaaggtgaagttaaaataagaatgttgagggatttccctggtggtccagtggttaagaatccatcttgcaatgcagggacacaggttcaatccctggtagaggatctgagatcccacatgtcgcggggcagctaaacccatgtgccacaactagagaaaaagcctgtgtgccacaatggagactccgagcagccaaaaaaatttaaaaaataagagggctggtactgtattgacctgttttataggctttttattaaaaagagaaaactaaaaaaaaaaaaaaagaggttggtggaatgtttaggtaaagtttaaaccctacctctcactcccttcacccactcttacttagcaagttggccatctctccatcttgcacatagaggaattgcccttcttagcaaagagcaaaacagagatgtcagctgggattctacacttgaagacagggtatcatcctgaagacagggagcttaagtgaaaaagtatatgctaaatattaaaaaaaaaaaaaacaaaaacaaaaaaaacagttatcttctgcctctatatcccctgaatgttagtagccaagcctaaaccttctcatttgggctactgaagcacccctctcaggagattctgactagctcccagctaaagagctgacattgatggttcagatgactacacactaaagaccacagtcaaaaaggcccctccatgaaggtggggcttccaatcagctgttcaatgcctcaatcataataaataatatataccatgtaacaataaacatgtgaggagaagggggaaaactaagaaaacgcgagaccagaaactcacgcgagaccagaaactctttaaaatacaaagatatttaataccatcaaaaaacagtggatagtgcacagttgtaaaaatgctggtcctaaactaaacacatacagtctatattagcaggtgattggttaaagcccttttccccatcttctttataggtcactggcaatctaataacagtgacaaataagcacaaatgtgcttggatcaactatccaggattgatctacctccttttaggaataaagaaacctaaggtattggattacatagcttacaagctgaaattttaatcaatggttgcccttcctttttgaatcttccaagatataaatgaaatcatggctgaagtcaagctcagctaagctttgaatctttcagcttccttaatttccttttattatgagttctaatataagaatgaaaaggccagttctctcattttagtggttgattaaattcttttaacagaattctttcacgtgggtgcttctaactttccatgtaacctactgtccatctgaccatgagacacgttaggctccttgtatgtaacaatttgttgatactattttctttgaaacagaatgagagtttcattcgggattttctttgaaacagaatgagagtttcattccggaacttgagagagtcatcttgaacggcagtttattactggaaaggatacaaaatacatttcaaaacaaatgagatcataataaacacatctgagactataataaaaacattgtgacaattttagattaaatgtattttcatttatctaattgtgatgctgggtagatgatacaccatctacttagacttggacataaatgaaacagagctggcagacatctgatttagacaggaagaaattatgctggtacataggatgtggtgctacaaatggtaaagaactggcctgccagtgcaggagatagaagagatgcaggttcagtccctgggttgggaagattccctggaggaggaaatggcaacccactccagtattcttgcctagagaattccatgtacagaggagcctggcgggctacagtccatggggtcacacagagtcggacataactgaagcaacttagcatgcacacataggagtgttggtggtaaaatctataaaatatgatgcggattttctcagccagtgtttgtcctgagcagtcagagtctacaacatttgtgtattttcctggggtgtcagaaggagaaggaaggaatgtctcttctctcttaagtgtgatgatggggtagaaacacctattttttaatggaatcctgagcactactcactataactcaataatctcactttaaattacatagtgggtgtttctgaaatgaactgttaaatgaatgaataaaatatagtcagcatcagtctattctgaaagaaatattagaagctctgtctaacacaatggtactatgctttgtgagaaggaaaataagggtgcaggccacagcagtgttctcaagaataagttcaatttatatgacaaacttttactaagagcctaccaccaaggacagtgttgcaggtacaagaggagagagagacctggtatcaagtagcttacatcagtaaagataaatacgtaaacaataaaccataatatgacaatgtcagaatctaggagtgtgaacaaaattactatggtaaaacacagattcatttaacttaaggaaggatcactatgttagaaggaacatgtgggaagcagcaaggatgagtagaggtttaaaaacagaggagttaaaagcattttagatcaagagaaaaataaaaacaaacacatcagaacaacagaatatacagaggatacttttaagccaatacttttgtcacagcatacatcaggataggagaatcaagaaacattatacaaactataacaaagctctgaagaggctgaaatgactcccccaagaacttgaatttaatacataggaaggaaaaggaagcaagaattctaaagcaagaaggtgataatactgctatttgggtcgtagatgagggacagtttggtgagaacaaggaaaatggaaaggtgatggactactgcttgattggttagaaggctaatgcaatggtctaacatgacagaatctgaccctgagttaggtcagtaatactagcattggtagaaaaaggaaagagcaagatataaaattgccatattatagactcgttcaaagtaggtaatttcactcacattcttttaattatgttattctcaagagttttatatttcaaaactgaaattcctttaagaatataagacattttagagctgtcaggaccatactacatcatgctttttacaaaacattttataaaataggaaaagagcttttaaaatgtgctgtgtatgctgcaaactgttgaagccaagtgatgggtctagaggggtcactatactataatctctacttttctataagtttgtattgagatatatgagtaaataaaggtataatatatttcaagtatacaaagtgataaatacatatatactctgaaaggattcccacgatcaagttaattaaaacatccatcacctcacatattcactttttctttcttttttgtttttagtgagaacacaaattcaactttttttttttgctctttattatttatttatttattttttactttacaatactgtattggttttgccatacattggcatgagtctgccatgggtgtacatagcaactttcagttaaacaatatagtattatcaactataatcatcatgcgccataagcctttttttaatgtatcttttaaaagtggtttcctttctgactgtatgctatttaagtaggccagtaaagcaatctaacatgtaattcacagaccatggatgaagaaaataacattttatagagcaagtacctttctaattaaaccttataagcactatttcatatctataaataatcctaatttttaaaacagaattttatattatatacatgtatatatatatatatacattggcataaatattgatggacagggaggccaggcgtgctgtgattaatgaggtcgcaaagagtcggatgcgactgagtgactgaactgaactgaatgcagaaagcaatcatggaatgactaaactgaatatcttaatgatgagatgtacagttctgaaatacacattttagttagtttatttcttaaacctcaaatacatgatttcacgatttcacagacgctttcctcagagaggtgtcctctatttaaagatcagaaagaaactcgatgcttccaggcaccccacccacagaccatcacagtatgagcagtaagtcctacttaactaagaaaattaagaacatgtatttctttcttcttccctcctttcttaagtcatctttattctcttcccttcctttcttccttccttctgagaaaggacagcaggttgagttaagcctaactctttgctctgctgcttattggctttgggcctcagacaagtaacagaccctctggtctcaaaacagtggtgaacatctatctctaattcagttacgtaaggaataaatacatttcagctgttatatcctctacatccatcttcattatcaccacccaacttgtaatctaccaatatgctcttgattcgtcacatatccgttcccttcaaatcccaagagttactttctaaagttacttcaccctgcagaaacggttcacaggctattcaatttccaagtccaataacctgttccccagtgttcactgtactctgcgtctactatctgacaataatactgccattctatagtttctttcccgtgatgatatcatgtgctgttttggcttcaatcatcaccctcatgtggatgatgccaaaatctatgtttcctgcaaattccccaaaagaatttccagctgccaaataattccacatggtctagattgctagtagttcaagcttaacatacacaaacatcttaatcatccttactatcccaataaaactcttgttttctttactgaagtaaacacactatcatcttttcgaacacttcaaaaatctttaacccttcatgttcactcaaaatacctattccattttaattgtgcatcgagttctactgattctgcctttggtatttatctcacttttttccactgctaatgccctaattcaagactcttttcatttcagcctggatttatacaacagctaaatagtctctgcctttcatctattctcgttgtcccatcactgtatatctatcataaaacagtcacctttgttcttgttttttttccttccttcttcctcaccataagtagagctcctcatgcttttaagtatcctcatgtactgtaaattcaaagctgtttacttgttctaagtttggctattgtcgtatcaccaactcacagaatattttagattttctttcattttctcttatgttttatctgtctcaataattccccttggtgaaatcatttttgttcttttgttacctgcagtaactcatctaagtgtattctagagtcagtacagctttttagatgaccacttatcacctagccctttattttttttaaagacattattttttagagtagttttaggttcacagtgaaacagagcagaagaacagatttactgtattcccctgtgcccacacatgcataggccctaccattatcaacatgtgcactagaggggcgtattcataactgacacatcctaacgacgcaaactctatagactgcactgtggttcacaacggtgggtctggataaccctatgatgacgtgtatcaccattacagtatcatacaggacatattcaccaccccaaaaatcctgtgtctgcctattcatcccacctctacccctgcccaacctctggcaaccactgatcttttactgtctccatagctttgtcttttccagaatgtcatatagctggaattatacagtatacaccctttcagattggcttcctttaatttttttcaactatgttattttctttggaaaatctataatatattggttaaggcaagaaaatatttcaggtttataggtcagggctactcaccaagggttcagccattacaacttcaattttcttttcagcttgaacagcaaattctgcaaagaggctcttgatgacatattcaccaggcttgacatctgggtcaattgtaatgcttgacatgatgatattctttttccccaaagtggaatgagagttggaagaagtgcagtacttattcactttgctgactggtgctgaagctaaaagaaaagaaacaaaagaactctactttaataatcaactcaattaggccaaccataaccacttggtttaacatgcaccctgcccctaaacccgaaccagatctcccaatctgtattaccagactctattttttctattacacttgttgccatttaacatactgcccaatataactataacttcattatatatcatgtttattatgtactatttatttattatgtgctatttttctcctcaccctgctgttgtgaattctatatgctcggagactctcttttgtcttttttgttcactgatgaatcccaagtgcttagaacaatgcctggtatatactggggatacaatacatatgtagtggatgaatgaatgaattctaaacaaagttgtatgcaacgaaggaaatatgtgtgaataaataaaatgcaaattgtgttaagttaaaatacactattttggagagaatgctctggaaacacatttgaaaaatcgaactacatttgaactcatatctaaattttgaaaaagaagaagcaaggcaaagcaccaggaacagaaagtacaaagttgagttgaatgtttgaaaaacaaaaaaggaccagtatggctgaagctcaagggatggagcaggggtggaaggcaatgtgagatgaagttagaagcattagtcagagaccaaagttttagagctctataaggaaaatggatattactctcaacgcaattaaaattcagtgcaaagtgatgacttggagaggaagaggatctggcttctctttaaaagattcctggctcctctggagaatgaattagatgaaggcaaatgtagaatccggggagccactacaaaaaatccaggtgagatgatcacagcttgggctaagaggatgatgatggcacagaagagaagggtctgtcagatgttagtggacttgctactgacagcaggcaagcaattcatgatgaatcataggacttttctttggatcattcaaaagagagatcaagatgacattgtgcctggcaaacagtacctcgaaccaagtgtgacattaagaagagcagctgttctgttttcttgatgcctgggcagcctacctggcttttatctagtttctccagttgccttgatcttcctacctgctgcatcaaacagaccttcccattctctaacttcagcttgtgacaacccctttggcctagaatatccatggagaaacctgtaagaaatgtacttctctaccttgacctgatctccagagactgcgctttcaacatgctgtcctagaaattactccctccttgaaataggaagcagaacacaattttttcaaacactttctgttcatgtgtgtgttacataaccataggacaataaatttaatctaaagaaatacattcccaactcataaggaattgttctgtcaactaaaaaaacaaaaaaaccctactctaccaaacataacatatgtcaagacatctgaagtgaccgtggtaactccaaaagaaaattctagaaagtaatgtaaaatcaggtgagggcagtcacttcagaaaaaaatcatttgcaaatttaaaaaataaatatttttgaaagacagaacttataaatgccaaagaatggcttactttcatgtcctatccattatctatgtttacttatttttgcatagtacagaatattttcctccaatggtaagattacaaattagtcatgcatgatgcttatattttcaaaataataataatctaaagaccattataaacagttaatattgcatataaaataaatatctttgtatcacataaaattaaaatatatattgtattctagaactaaaatcatataaaagagttcaaaataaaattcacagttctttgaacacagtgtatgctatttattttaaacaatgacgtgtttactctgtttcatgatccaacattgtatattataaaggagagaatatgttaacaaatgtcactatggggaaagaagatcttaaatttaaaaattttattttggatcattaagaatattttatattttatatccacattatgttagatagctgtagagaatcataaaatagtcaaaaaggctactcagtttctagaatttacattttaggaataaaaatgaggataaaacattttaaaaattttgacttatggtagtagatgcaaaatatatcttttcctgtaattaagattcataaggtcatatgagggttacaaagtttctttggctttaactttataataaatgttttaaataagaagtctataatagatcttggcacttgaactgtagactttgatgaggtataactttaatgcattttaacttttaaagtcttctcaaaaagaaaaactttaattaaaatgatcactcaaataactcgttactgtcttctacttcctaaaaagcataaacataagttaagcataaataaatatgcctaggtatcataactacgttttcaagacatttgccaatacaaccagaagttttagggaaacttatatttatcttccaaataaaggtctatcttccaaatatctgcattacattctaacatcaaaatacttcaacttgaaagaaaaatcaaatttttagtgtttaagagttagtcagttttacctcaaaatgaaatcagttagaaaaagacccataccagaactgaaacctggacaaaaaagatgaagaaacaagctacaaaagataaaacaagccaataaccatgaaaacaatatttaacttcactgatatttttaaaataaataaaaattagataactttttttatgtaccaaaatggtttcccccaattgtgtatttcactataatgttcagcttggctaagatatgtgaatttttctcatattctgctaatagttaagaaaaagggatagtcactctaagcagggttaagaaggttagttactacataactagattaacctgatgtcaccagactgcttgagtcaaatattttatgaagctaaatagtactatttctctacatgctattaaagttatttgaaaattttacatatgtctactagagaaggaatgatgctgaagctgaaactccagtactttggccacctcatgcaaagagttgactcattggagaagactctgatgctgggagggattgggggcaggaggagaaggggacgacagaggatgagatggctggatggcatcaccgactccatggacgtgagtttgagtgaactccaggagttggtgatggacagggaggcctggcgtgctgcgattcatggggtcacaaagagtcggacacgactgagcgactgaactgaactgaactgaactagagaataatgacctaactgttaagagtgtaattcttaacacaattcaggcattgaattataagttgtaaaaacccaatgtcatattaaacatccttggaatataaatctattaaactctgataataaaaagaataaagccagacctgagtgattaacatataaaataagatagaaaaattaaaagctagcctgtgtactctttctcatagatatgtgtgaaagtcgttcagttgtgtccgactctgcgactccatggatatacagtccatggaattctccaggccagaatactggagagggtagcctcttccttctccattctcatagataaagtgcaaataaaatgtaaataaggcacttcgaaaattatttatttatttgtatgaatgtactgggtctttgttgctgtgtgcaggctttctctagttgcaatgcaagggcttctcattgcagtggcttttcgttgcagagcaggggctctaggagctcaggcttcagtagctgtggtatatgggcttagctgctccaaggaatgtggaatcctccatgggacaaggatcatcgagcccatgtcccctgaattggcaggaagattgtcaacctactggaccaccagggaagtttggtatttttagacagtgagctctgtataacattgtacttagcatgtttcattaaaaaaaaaaaaaaaattaccttcttcatgctcatgagtctcctattcccttacaggataaatttaaattcagtgaaggagaacagacatgtaagaagagacacaaaaaccctaagttgaatcatgtttgatttcattactttatagcagtggttcttgttgttttctgcctccgttatatttttacgtgcaacactctatacaatgctgctgctgctgctgctaagtcacctcagttgtgtcagactctgtgcgaccccacagacggcagcccaccaggggtcccctgtccctgggattctccaggcaagaacactggagtgggttgccatttccttctccaatgcatgaaagtgaacagtgaaagtgaagttgctcaggcatgtctgactctttgagaccccatggactgcagcctaccaggctcctccatccctgggattctccacgcaagagtactggagtgggatgccatcgccttccccgaccttatacaataactccgtctaaattcagtgactcttagtgattgagctgacctaaaaaagatgagtaggggtgagtagatgtagttttaaaagaccccagtggagtccatgaaaactgcatgcagcaccctcacgcccaaggccaggtctttaaacataaaaattactactctttggtcataatcttatacatacatatttatgtagagatttatataatacagaaaagtaacaaaatactacacaatttcttattataataattatttacttatattgttaataataaaacatgtcgatgatgacctaagaaggaaaaggtataaggtaaatggcctttgaacaagaccaaaagtcaaaaatatctattttaaaagacataagcaaaactcttagtttaaaaagcaagcctctcccagcaagatattttgtggctatcaacaaactgactgaaatttacatgaagaggcaaataactcagaatagccaacacaatactgaagaagaacaaagttggaggactgacactactcaactttaagacttattttaatgctacagtgaacaagacagtgtgctactgatgacgaatacatgacgacatcagtgggacagaaagagagcccagaatagactcacacagagtcaactgaaactaatctccgacaaaggagcaaacgcaatcagtggaaaacggagaattttcaacaaatggtattggaataactagacatttgcatcctataaaaataaatagatctagacacagaacctacatcttttacaaaaactaactcaaaatggatcacagatctaaacatgaaatgcaaaacaataaaattcccagattataaggagaaaatctaacggttcttgggtttggtgatgactatacagatccaacactaaaagcaagacccatgaaagaaaaactgataaactgaagcctttattaaaataacttcagctctgcaaaagatatcgttaacagaacgaaaatacacagactaggagaaaacctttgcaaaacacgtatctggcatccaaaatatataacaattcttaaagtgcaagaagataaactatccagttttaaaacagacaaaacatctgaacagactgcacaccaaagaagacatacagatgacaagtaagcatatgaaaagatgctccacatcatacatcttcagagtaatgcaaattaagacaacgacgaggtaccactctggatgaaaaatgtcacctgcttatcagtaaacaaaggaacttgtagttatgaagccatcagccactgcagaccccctcacgtgtgcactctgaggagagtcaggatggagaaaaacagcatactggccctagataattaaggtacatatcaaaggaatgatttcaataagcccagatgcttccatcttcccatacatagaaaactgctaagttcattaacttcagatgtctgcttttctttaattaacagtaaacttttgatgttctgattacctggctttttgttgtaaaaactctaatatatatcctgactcctcctttacctcttagaagcagtccttcaaagctatctgagaatctgcctcccaggcctacatcctcagcaagtctgccaaataaaacactatcctcagtttttaggctgcactttttttcttttttcagccaacagcactacacacctatcctagtgatcaaaatccacaacagtgacaacaaatggtggtgagcctgtgggacaacaggaactctttgtcatcactggtgagaatgtaaaagggaagacagtttgaaggattctcacaaaattatattcttatcagagaacacagcaactgtgctcttttgtatttacccaaaggagttgaaaacatacatacacaaaaacctgcatgcagatggttgtagttgctttattcgttaactgtcaaaacttggaagcaaccaagatgtccttcagtagctgaatgaataagcaaactgtggtacatctagacaatggaatattgtttagtgctaaaatgaaatgaattacatagccatgaaaagatgtggaggaaacttaaatacatgttactaagtgaaagaggccaatctgaaaaggctatattccaattgtatgatttcaactatttgacattctagaaaaggcaagactatggagacaacttagatgagtgactgccaagggccggagggagggcaggataaataggtggaacacagaggatttttaggggcatggtactattctatatgatactgcaacgctggatacatgtcattatacattgtcaaagcccatataaagcacaacaccaagactgaagctgtaaactatgggctttgggtgattatgatgtgtccctgtaggtccatcaattttaacaaatgtatcacattaatgtaaagtgtcaacaggagggaaaatgggcagagcagggagggcaggagaaagaggtacatgggaactctctgtactttctgctcaaatttctataaacttgaaactgctctttataaaaaaagtctattaatttttcagaaaagaaagaaaggcctattctattcctgtcagctagaaccaaaggtgcctgggaagagccacaataaacaacagcccaagccaaagcttaaaacaaaaatgtatttggattaagctaagaggaaaaaaggaacaaaacaatttttaagtcaattaaactaaaacatcaaaacacaaatcaggttacatggtagacaaattgaacacagagacaaaggtagcagaatcagtattagggaataaatgaaaatttcaacttttggggagaccagttggattcgtgtatctttctaccaattatccaaagcaaaactgtacatttgaaagcaattatttctgaagaggaaaaaagaaaatataaataatgtgcatgttgaacatgttaagagataaattatgaaaatatcatgtgatggcttccgtgcacaaacacaatttgctacatgaggcaaggaaagtgaaagtgttagtcactcagtcatgtccaactctttgtgaccccatgaactgtaagccgtcaggctcctctgcccatggagttctcccggcaagaatactggagtgggttgccatttacttctccaggggatcttcccaacccagggatcaaacctcagtctcctacattgcagattctttaccatctgagccacaagggaaatcaacttagccaaaggtaaggaacgtatacctcaaaattccttcataaatgaaagaacctcacaccagacaccattcgctgatgattttggagacattatttaatatttattaagacattttgcatagtatcttattttatgctaacaaaccaaatcttatttcaagtgataagctggtaaatggccctctttaaaaaaaaaaagtcctgatttgtagcatttgataatttccattgttcaatcactcccatttatggatgatttcaagccatcaataatttatcaaccagctggtaaaattcctggaaggaactagatccaaaacatcacatcaagttattgtccacatacaacaaggaaactgccttctaattaaagtcgattgtttcatttggatggaatgtgaacttcagtcctcagtttaagaactttcagatcagtggctttatatcctctaaaactgccagattttgatatatccatttttcctccttaaaagtctgtattattaatgtactatttgcttagaataactatcccaagtcaaatatggttgcatcttcaaattcatttacataaaataggctaaaaaagaaaaagtattcccattttgatcagacatatatttaacactatttacttttaactctcttttagtctcatttactccatttaaatctgtccaactggaatttatttgaggtgttacacaataaagatagtttttccttaacatttaattggttcttctcagtatctttactaaaaatttgtccctaattttcactatcataaactaaattcatactcaaatatgctttccattttgctcatcaacaatcagttttgtatcagcaccattcttttcattattgtagctttataataggttttattatctgttggaaacaaatactcctggtttactcgttatcttcaggaatttctcatttattgtcatttacttatacttccaagtttatacaaaccttcacaaagtaattagaagacatctgacaccttaattaacttcttatctagaacctggcatacccttactaatttgtcttctttcatgaacccaaagaaaaatgtctattttgcttcataggagaaactctccaattcttctgtttctaaatactttgtctattctgtgtaaatgaaattattttcctcaccactcaatccaaagattttgcttctggatgaatttcaatgaagagaaaaaataagacttttgcttgttctttggacagctgttcataaaatgtttatttatcctaggctaaactattcccattgaaaacaatttctaaacatagaagttcctatgacatctttggcacatttccaacttttttttttttactttaaatctaccacagaaatattgtttactataaagatgaagaaaaatgaccgatcatctaaataatccattactcggccagaatctccctgtggttattatttttgaacaatcagaatcttggctaggaaactattctataaatttagtaataatgtagtattttaaaaatatgtatagatctaagagtcagaagatgagagccctagatttgacttggctactgagtgtcattataaccttggtcaaaatactgaagctctctaagctttgctccccctccaaaaatgaatgagttttagctcaactgtgggtatggtatcagaagcaacaaaaaaagttgttttcatttttgttctccattcttctgcccataaaaattttcactgccaatgaaaaacccacagtggcaaactctcctctggccagacgtaagcttgggcactaccacagcacagccgtaaagtaaaaatattgggttggccaaaaagttcgttcagctcatggaaaaaaccaagcaaactttctgctaacctaatgtatatgaataccagaatcctacagtaaacataccgagttgtttcatccagtaaacgtacctagacccagggcctgggagaggtaaataactacatatggttttgtacccgtttttcttcgacttacaagaaagcgagcagaatctaaacagttgggctgagttctttatacccttgaggctgataagatgtaaagagaccaagaaaaaacagactttctcttaatattttaattggttgctaactaagaaaggcttatggagcctgcatttccttccatcactcttgggattacactttaaaacagtcatatagctgtacggcccatacactttattagctgacaaatttactggtatccagcagagacaaaaggaacgaaaaatttaccatacaccagcagcaaatatcattgtagatttcaaaacatcaaatctatttcaattaaaacagaaactaaacaaagatgctgattcttgccttaccattcacttctgttctaaagtttacaggataataagtaaatgcaataagataataaaatgaaatcattattataaatattgagaaagaagatatgaaatttattaactagcaattaccatgtagaaatgaaaatggataaaaacttactcacaaatataaaatacataggtataaatttaataaagaagcataggacttacatagaggaaacgataagaacttcttaaagaacataaaaagaagacctgaacaaaggtacggacaaacttacagataaaagcatttattcgtttaagtgtcaattcccagaaaatatattagtacaattcgaattaagatttcagtacaattttatttaggttgtattagataaaaattatcttagagtatactagatggtgaaggacagggaagcctggtgtgctgcattccatggggtcacaaagagtcggacacagctgagcaactgaacaatactaggaggagggcttcctcggtggcgctagcagtaaagaacctgactgctaatgcaggagacatgctgctgctgctgctgctaagtcgcttcagtcatgtctgactctctgcgaccccacagacggcagcccaccaggctcctctgtccctgggattctccaggcaagaatactggagtgggctgccatttccttctccaatgcatgcatgcatgctaagtcacttcaatcgtgtccaactctgtgcaactcctccgtccacaggattctccaggcaatactggagtgggctgccatttccttctccataatgagatgcaatgcagtttcaatccctgggttgggaagatggccaggaagagggcatggcaggtgccctctaagtgtccatcaacagatgcagggataaagaagctgtggcatatatgtatgtacgtgtatgtggaatactatttaatctttaaaaagaatgaaattttgcatttgtaacaacatggatggacctggaggacataatgctaagtgaagcaagccagacagaggaagacaaatactgaataatataacttatatgtggtatctaaaatacaactaactaacgagaaagaagcagattcatagatatagagaactagtgattttcaacagggcagggaagaggagaggagtaatacagtggcaggggattaagaaggaaaaactgttatgcataaataaattacaaggatacactgtacaacacagggaatatacccaacatgctgctaagtcactgcagtcgtgtctgactctgtgcgaccccatagacggcagcccaccaggctccccatccctgggattctccaggcaagagtactgcagtggggtgccatttccttcttcaatgcatgaaagtgaaaagtgaaagtgaagtcgctcagtcatatccaactcttagcaaccccatggactgcagccaatcaggctcctccatccataggattttccaggcaagagtactggagtgaggtgccattgccttctccgatacccaatatagtataactataaatagagtcaacctttaaaaattgtgaatcactatattgtacacctgtaacttgtgtaatattgtacatcaaatataactaaatttaaaaaaacgtagtaaaataggtaaaatatatctatcagtctacatataaataattatatcagaatgttatgtaaaagtaattaactcagtgaatattaaatgtacataatccagatcaatataaaagattggagagcctcgccaaaatttcagaaaaagaattcaacatagtaaaagtagaagaaaagaggtgatttatttagtaataattttggaatatcttgctacttgtctgcagaaaaataaatataatatattcaaagaccaaatgtattaaaaagaatacatttgaatcagttctgatgagatggatgaaactggagccgattatacagtgaagtaagccagaaagaaaaacatcaatacagtatactaacacatatatatggaatttagaaagatggcaatgatgaccctgtatgcaggacagcaaaaaagacacagatgtgtatagcggacttttggactcagagggagagggagagggtgagatgatttgggagaatggcattgaaacatgtataatatcatgtaagaatcgaattgccagtctatgtccgatgcaggatacggcacgcttggggctggtacatggggatgacccagagagatattgtgtggagggagggtgggaggggggggttcatgtttgggaacgcatgtacacccatggtggattcatgtcaatgtatggcaaaaccaatacagaattgtaattttttatttttattaaaaaaaaaaagaccaaattccagatggatatgaagtaaaaatgttttaaagtcttagaaaaaaattcaaagtcaacatgcataatccaggaaagaggagaatttagtgaagatagaaggcccaaaattatttaaaaagaatgccttcgaccaaagaaaattttaaaatatttataaggaaatttataaggaaatgataaatataaggcatcacggactcaatggacatgagtctgagtgaactccgggagatggtgatggacaggagggcctagcatgctgcaattcatggggttgcacgactgagcgactgaactgaactgaactgaactgataaggaaatgatatcataaacaagaaaggacaaaagttggggggaaagtcgaatgtagatgacagaaagtataaaatattcaaagacttcttacaaatttacaatagaaagacaaggcaacggagaaaaaaaaggcaaaagatgtaattagacaattctcataagaaccagtctaaaaagacaacaaacatatgaaaaaaatattcagactttgtactggccagaaaatgaaaattaaacttgcagtgagctttcactttatacacaaacattaaatttgtggcaaatattaaaaagaataattggatgtatagctgaaaaggtacaaggaaattaacacaacatattgctgatggaaaagtcctgttcaacagtcaagtagggtggacaaaggatgagtgttctggcccctatagcagagcctgggcagataataaatttctttgatctttaggctctccatgcaacttcctgattacagtgtaattttgtatgatctaccccacaagtagagcaaagaacggtcggtctgccagctccagcattaatgttctttcacttggcatatttctcattgtaaattagtaaattggcacatgtaaaagcttgtctctgtcagaagactgtttataacaattctgccccttgagaatgattttacatccactctcagcattctggcaaagtcaggatttcctgacctgatggcagtctttgctggccttctctggcaattccttaaatcagaatcaaactctctggagggagatccaggcatctgtatgtttctgaaaactccccaacgtgactcttttgctgcgcttagttgctcagtcatgtccagctctttgtgactccatggactgtaacccaccaagttcctttgtccacggggattctccaggcaagaatactggagtgggttgccatgcgctcctccagggaatcttcctgacccagggatcaaacctgcgtctcctacattgtaggcagattctttaccagctgaaccattgaggaagtagccagggtgaaaaccactgcctttcactactcttccaaagcaaaacattggttctacacaatgattttatttaaaactaattttgatgagaaaaagtttcaaaaacaccataaacaaggaaacatataatatcacaaacaacatccatcagagttagatgaatgcatgtcagggacagagctctagggagcagagaaaaggatcattcataggataaataaaaaatctaattttaaaaagttatctatagttctctcaattcatactagaaatcttaaactgatttttctttcaggctttcagtctcttcactttactcactgtccatgacctaaaccacatatctcggtggccaatcaatccttgcctttcattatctgtgatttcaaagaataaagtttcagtgatctaaacttaaagagttatcactgatttctccctgtgccctatatttcatatctagtctagccatcaaataccatgactactaaaagtaatccccacttcctttttctgcatagctgaactttctgcataactgaatttttaagttcaggtcccaataatagtctacgtaaactccttaaaagtcttccttcacagtcatccctgcctcttagctgatgaaatatcaacttcatatagcagccaaagggactactttatatttgaaccatgtgtgtgtgcctgccttctaagttgcttcagtcgtgtccgactcttagatcctatggactatagcccaccaggctcctctgtccatgggattctgcaggcaacaatactagagtggattgccatgccctcctccaggggaacctccccatccaggtattgaacccacatctgttatgtctcttgcactgggaggtaggttctttaactccagcacctcctaggaagcccatatttgaaccagactaggcctttatattagagaaggaaatggcaacccactccagtattctttcctggaaaataccatggatggaggagcctggcaggctgcagtccatgggataacagtcagacatgactgagtgactgagcagaggcctttatatacggagaccctggtagctcagacagtaaagaatctgcctgtaatgcaggagacctgagttcgatccctgggttggaaagatcccctggagaaaggaatggcaaccccactccagtactcttgcctggaaaatcccaggacagagggtctggtgggctacagtccatggggtggcaaagagtcggacacaactgagcaagtaacactttaaacaacacaagggcccttatatgagcttcgctggtaactcagaggtaaagaattcgcctacaatcaggagactgcaagagacatgggttcaatccctgggttgggattcagtattcctgctgggaaaatcccatggacataggagcatggcaggcttcagtccatggggtcacaaagaattggacacacgaggagatcagccctgggatttctctggaaggaatgatgctaaagctgaaactccagtactttggccacctcatgggaagagttgactcattggaaaagaccctgatgctgggagggattgggggcaggaggagaaggggacaacagagggtgagatggctggatggcatcacggactcaatggacgtgagtctgagtaaactctgggagttggtgatggacagggaggcctggcgtgctacaattcacagggccgcaaagagtcggacacgactgagtgactgagctgaactgaaagcaactgagaacacacgcacacaggtccttacatatcaaacatcgcaatgcctctgtactctgcaaaaaaatgcaccactaaccttactttcaagactattactaaagccattttactggaatcatcattttcttttcttccacagtctccctacaataagaatggttcaaaactttatgtgaattttcatctttttttttttagaacaattttttaaagagcagtttttaggctcacagctaaattgagaggaaggtacagagacaacccatatacttcctgctcccacacatgcatccttcccccataatctacatcctttagtacacttgctgcaattcatgagactacatcgttatcacccagagtctacattaggattcactctttgtgctgtacattccataggtttgaacaaacgtaccccgtatggaacaattgactggttcaagattgagaaaggagcacaacagggctgtctgctgtcaccctgttttgtaaatgctaagcacatcatgagaaatgctgggctggaggagttacaagttggaatcaaaataagcaggagaaacatcaacaacctcagatgtgcagatgataccactctaatggcagaaagcgaagagaaacttaagagcttctttaggaggagagtgaaagaggtggcttaaaactaaatattaaaaaaactaagatcatggcatctgaccccattgctgctgctgctcctaagtcgcttcagtagtgtccgactctgtgcgaccccatagatggcagcccaccaggctcctccgtcgtccctgggattctccaggcaagaacactggaggaggttgccgtttccctctccaatgctgaccccattacttcatggcaaatagaatgggaaacagtggaagtactaacagatttcctcttcttgggctctgaaatcactgcggatggtgactccagccatgaaatcagaagacgattgcttcttgacaggaaagtgatgacaaacctagtcagtgtgttgaaaagcagagacattactctgccaacaaagggctgtatagtcaaagctatggtcttcccagtggtcacatatggttgtgagagttggaccgtaaagaaagcagagtgccaaagaactgatgcctttgaactgtggtgctggagaagattccaaagagtcccttggacagcaaggagatcaaaacagtcaatcttaaggaagagcaaccctgaatactagctgaaaggactgatgctgaagctccagtattatggtcatataatgcgaacagccaacttactagaaatgtccctgatgctgggaaagattgagggtagaagagggtgtcagaggatgagatggttggatggcatcactgatgcaatggacatgaacttgggcaaacttcagaagatggtgaaggacagagaagcctggcaacctgtagtacatatggtcgtaaaaagtcggatatgactgggtgactgaataacaacaacatccatcattacagtatcatagagagtagtttattttccctaaaaatcctctgtgcaccacctactcatccctccctctccccaatccccaacaatcactcatctttttactgtccccataattttggcctcttctggaatgtcatacagtatgtagccttttcagactggcttctttcacttagtaatatgcaattatgtttcctccatgtcttttcatggtttaatagctcatttcattttagcactggataatgtttcatagtctggatgtaccacagtttgtttattcatttatctactcaaggacatcttggttgcttctaattttcagccattatgactaaagctgctataaacaccagtgaagcttattttaaacaacaaagatccactgaacgcatctaatgtaaatgtcttatttgttattatgttatactgttactatattgcatgttaatggatattaatagattcttcaatttttgaatgcctttgctaactaggtaacttatgttctctttgaccaatgaatatatctgtgaagcaatgagaacataaattatgctaccaaattcattttataaaaccctagttaaaaacttccttgacctttcatatttaacccaagacctattgttcttagtcttaaatagttcccatatccatgattaagaaagtgaagtcagtcagtcgtgcccgactctttgcgaccccatggatagtagctcctccgtgcatgggattttcaaaagcaagaggactggagtgggttgccacttccttctccagggaatcttcccaacccagggatcgaacccaggtctctcacattgtagacagacgctttaccgtctgagccaccagtgagctaatattttgtaaagcatttagaagagtacccacagacccacccacgtgggagggattacatacatgtctactaaggaaataacatttgtttattccaccttcctcttatgtctgatctactgcagtagtaaccgaaagcagcttcctacacacgctgcaaccctctctcagcccctttttggtccccaatccatgggaaatggaactgatgaaatcacctgaaccactgtcacaaagcccatcaatggctccccctttgtttcaggtttacgatcgaaatgtatgagaaagtctttaggatatgtggtctggcctctgacaacctttctagctcattctcatcactttcccccatccctcagctccagtcagactagtgtatttcctcctactcccagcacatcatattccttctacccagctactgccccccgaaactgtcaactatttcttccttcacatttcactcaagtctcactgtgtgtgtatgctgagttgctcagtcgtgtccaaatctttgcaacaccatggatggtagcccaccagactcctctgaccatgggattccccaggcaagaacactggagttggttgccatgtcctcctccagaagatctgtttgacccaggggttgagcctgcatctcttgcgtctcctgtactggcaagcagattctttaccactagtgccatttgggggaaaagtctcagggaaattttaaaattgcaatatgaaggattagaagaagttagttagattaaaacatctgggtgtgtgtgtatgtgtgtttgtttttttgtaggggaagtgttcttagtgcactttaacttgtctgtgcccctatctactcttttgtaaaagcatcagtttttaacagatgaatggacaaatgaaatacagtatattcatacaatggatattattcagccatgaaaataatcaagtaccaatatatcttacaaatggatgaaccttcagttcagttcagttcagtctcagtcgtgtccaactctttccgaccccatgaatcgcaacaggccaggcctctctatccatcaccaactcccagagttcacccaaactcatgtccatcaagtcggtgatgccatccagccatctcatcctctgttgtccccttttcctcctgccctcaatccctcccagcatcagggtcttttccaatgagtcaactctttgcatgaggttgccaaagtattggagtttcggcttcagcatcagtccttccgatgaacacccaggactgatctcctttaggatggactggttggatctccttgcagtccaagggactctcaagagtcttctccaacaccacagttcaaagacatcaattcttcggtgctcagctttcttcacagtcgaaccctcacatccatacgtgacccctggaaaaaccatagccttgactagacggacatttgttggcaaagtaatgtctctgcttttgaatatgctatctaggttggtcataactttccttggatggtcataatatttccaaggatgaaccctggaaatatggtaagtgaaagaagtcacaaaggaacatctatagttgattccatgtatgtgaaagttccagaagaggcaaatctatacaaacagaagtcagaagactttaccagaagttatgaatatgtggtttccttttgaggtgataaaaatgttcaacagttagaaagtagtgattgttataaatacaattctgtgaatacactaaatgctacggaattatatactttgaaaggatgaattttatggtatgtgaattatatcacaataaagctgctatttttttaaaaaaaggcaataataacagtttttctcagattttaaggattataagagatttaaagtatgtgtatgttgtatacacacacgcatttacacaattatactatgcacttaacacatatcagacccataagtacttcaataaatggtgcatactgttttgagaaaataacacgggttttaactgaaattagatgaacgcataattgtgcttttaggattgatttttactatttttgcaattcaagaaaaacatctggacattaaaaacactatttatgaatttttacattgggtaaaaatccaagtaaattatgcaaatctcattttttaacatattttatcttacgtacattttaatttataaaactgtggttaaataagtccatttatttcttctatgtctgtgataaaaactgaattctttgaaacactgtcacaaaattattaatgtaaattctataaattaacatatttacaagaggtagtatattgataataactgtatctgttaccttacactgaagatatataactaaatagatcttagtactaattcttgccttgtcttatcaatttaagagagctaagctaatctttaaaatgataacatcctcactacactgttggtttaacagaatgttcctgattcagtttttaaaagaagtaatgcctaaaactgttggcacaaagacaaaatcctgaatttaggccatatgaatgtcacttcattgttgttactgaaagaaataagctcaactataatcaaacttcagcagcactgcatcaacattctgccagctaagcaggcctcaaaaccagagggcctctagcaaataacataaaatgtggcatcgatcattaatacaaatcatggcaaatgcacctacatgaaacattattatatttaatgataaagaattataatatatactgctattaagttattttcaataacaaaaatcagatctttctctttccttttttctttggaggataggggcaatatttgaaatatatataacttatttaatggaaaaattactttccatttctttcttctccctaaaagctattaataaagctagtttttctcagcttttcccaaggaatttaccgaacagaatttagtcaaacattattatcttttttaatcactgagggatccttctatgcattcctacttcagaaactgttcccctgagagacatcactagtataataataatcacataatctaagagggcgcgtatatttttcctactacctcttttcctattattaatccattccaataaaaatgtgtgcagctctaagctttatcttaattgcctacacatttatcacaagttaactaagcattaagtctacaaagaaaaacaaaaccacaaccaacctatgcccttcggcaacttatcctcaagtagcagaggaagacaggaacggtgtggttagtgtagtgataacagtgatattaaagtgaagaacaggacagacaaagcacttagtatctggctgactcaagaaaaggtaggtcttaaacaggagtaagaattcactgtgacacagacaaaggggtgagggggtaggaggtgcattcgaggcaaacgcagctgcaaacaggcacagcatgctccaggaaccaggtgagtatggcaagagaggagaccagcaagatgagcagggctagatgacgacaggctccaccacacaggggaccggaagactacgcggtaaggaggggagaggctcacaatgcagacatttagaaggggccccgggcagcagtggggaagatgcagaaaggatgaaaaagaagctatggccatactccaggtgataaggcagaggcctgaactaaggcacctctaagtggtggtggcaacagaggcaggagagactaaggacacttcagaaggtagaattcagaaggcaagtcttggtgagtgactcaaagggctgagtcagaaacctggcttctggtttggggagactgtgggtggctgtactgcctaccaccatggggagcatcttattattcaaaactgaattccagtaaatgcctttgctgctaagtcttctctgccctctgtggttcaatatgattccttccaccctagggttccctgtgtctatagtgtgtaccagatatttggttaagtcataatgtaatgtaatgcatatgtaacatttttcacttaacttccttatgtgaacttgtcatgtatattttctgtctctgagtaaactatcaatagaagttccttataatcaaatatcacaaggttacagagcagtatgtaatcaataaacgttggctgattcaagtgttgtgcttgtgtgtgcttgtgtttagttgctcagttgtgtctgactctgagacttcatggactgtagcctgccaggctcctctgtccatggggattctccaggcaagaatactggaatgggtagccccttctccaggagatcttcccaacccagggatcgaacctgggtctcccacattgcaggtcgattctttaccatctgagccacgagggaagtcatattatgaacagatactaggaagagatagataaccactgtccttttctagggtcttaagactatcttctctctctctctttaaatacagtagggctaaatgaagattaaaagtttttaaaaaaagatatccacagatgctggtgaaataaaaatattctcccactttccaggattagggcagacatggttagggccttactgaacagtgagagttgtcacttcttttcagtagttatctactgctttaaaactattaaaaaacatcttcaagaggtttgtaccatgaatgcccaagggcaatgggatgcccacaaaccaaatcattcttttactaacagaggacagcaaaggttttacaaacatctgttttggtttcactcttggattcaaggaatacgactgcatgagatttggctacggattgttatatggttcatgtaatgacatgtagaaatgtttaaatggtcacaaaacaaaataaccacatagttcacaagcatctaaacaaactaagtttttacaggacaagctgctgtgtataatctaatatacactgtttctctataagaacccatttatagcttcattctcactataaaactgtcttactatttttaaaaaagtacatggtaaggacgggggaagaagggagaaggagagggaaagaggaaaaaaaaattaacaaccagagtctagtttattttagtaaaaatgtattctatagtatctttttaagtagtaaattatttaatttaaattagtaattataattctccaatattttaactatgtatattcacatagaagctttcctcatgcaaagataattttctgccatctggcacaataatatctccatatggaagcattacttacatatcaaaaataaaagagaaataagagattgtaaatgtagtatatttggcataatacaaagctcaaattatagtctataaagttctattttaagaggtcccccatatcaacatttgctcttttatactatttgattacaaaataaaactatatcaaatattttggttagagagttagccagaaaaaattaaatttagtctctcatattttattcattagtttcctcagaaacggacagcacagttgggagtaagaacaactgggttctaattccagttctttgccaccatatgaccttggaaaagtcacagtttttctatccttcagttttctttgggcaaaacagatactacagcagaatttctgcttgtttattacttcattaatctggtatcattttattaagatacttttcacagaaaaaagaaagaaaagaaaaacagactatgataataaataattttcataagtgctttgagatcttcagagaaaagtgccactggaatttactggaaagaatgaacaaaatcagtatttgccaagtccatatattaggaaaggagtgaataaaataagagctcagtgatattggttttaatgacttatctaaactttgaaatacaaaagtatatcatcctgaatattctttatcctaaaattgactacacgtgaaaattactcaatgtaacttcagttataggactacaggaaagttgcagtcattacattgtctgatgctttgagatagctgatgctgtttctaaccaacattttgtgcaaacatagctgtggaatagtactggtatccgataaccctgcagacagagatcagagtctatttgtcatctttattctccatttttgaccaatagatagaaactttgccaggacacaaattaataagaaaagcccagactggtcagagaatatttactcattttatagctgccagcatgtgcgtacctaggttgctctagctgtcttactgattcttcatgttattttcaacagctttcattcaatttgcatggggctaaagaattagcatgcaagaaatggcaatgatcatacctcaagcatttctcctgtttaggcaaatatacttacagctgctgctccaggactttaacaaggactttatgctaatttcaaaaaacacagaatcctgtagactcaacattgtgtcccaactggctgcagcagcagcggtagcagcagcaatggatttgttgatctctctctgagccgctgtcccttctgctttcacaggcagcagagttttggcccacagagcctcagcttcattaccatgcagtcttgcagtgacgcacaactatagtggaaatgctgctgaatgcagatgaactgttcagctgaataaaggcttataagtttatcacaagtgccctgaaggacaccctcacctttcctgctggagatacacacgtggccgaaatcaccagctctgtttattgtccccgttatcagttttgatgagctgtgtctctggctgctttcagtgtagtcactactgctagtaaacagacaagggtagcgctctgcccttgggtgccaacttttctagctcagagcctcagaagtcagaaacgaatttggatccaacactaagatctttaagtctcttcctataacagctgaccctctctgctgccaaaaaagcatcggaggtgtttattccactcccatcagtttctctaggtgattttcatagtcagttctctccacccctctacacacccaggcagcaggcagtgactttctcagcgggcttatgatgatgcagagtccactgcctcacttaacccgccagagagaacgctggctaatggaatgaaaggatgatgtaatggacaccgtggctgagcttccatcagcctctaaaactgctcggctcaggacaaagtttcctctgctacaggcaacttattcaaaagagagaaatctattagaataatgggattattttaaaacatagggtcttctgttcttaacacaggacataattcccctcaaactcttatagtccaaataccagtaaacagtgagaaatcctctggccaaataaaacacacgttttaaaaactttattctatagaagctagttttagatggaaagctgacactatttaaagtctgactgttcttcaaaatagcagaaatattctaaaatcaaacctgatgaataatatttgatgttaatatcagaagaaaaatgtcttgacctcacaatttaccattactctgaagatcagtattgggaggaggaggggaaggtggtatttttccatctgtggcaatacatttgtactgatccatctatatacttctgtatcctttaaataccacaaggaataagtaaattccatgatcaaagtcataactgaatagattaattcatagccaaaaggctaggtactgtattaaaagctaaaagaatattcttctgtgcataatacattaaggagaaaagatagtcatactcattaagacacattcagtggtaatagtattactgagagcatcatttaaagcttatttcttcagagtagtccaggaactctggaataagtctgtagccattcctacccctgaacagatctaaaatcaaaattcaaaccaaggctacaaaggataaccacacagaactccaataccacaatactgttgtttcagcacatcttcttgatcaaacacatctcaggatcagggaagaacaaggtttctcctggcctaatggaacacaagtgcctcaaggagttgcatgaacaaagggtactccatagtccaaaaacactgcccacaacatccattcttgaacattaacaatgtatgtcaaccaacaaaaagctctcggttatacacaaactggttcaatttttccctttaatcaaatattcctcaaagtgatttgacaatacaatcctcttttcatcaaatggctgtcaatagagtcagggaataagctggtcaagacccaaacaaactacaccagcaaatgtcaagacacagaactgaagtatttcagcaagcagacaagtcagaaggcacacacagatattttatcatagtttttctaccactactgagctaagcctgttagtcttacacaaaacttaaaacctacttaatattatttgttccaccaaagtaatcagagcttattcttagtaaacctttgtaaactataaacttttataaactataactgccacatagaatgtccaaataagataattttttcaggggctaggggttaaataataggtgatttttttcacaatcttaaaaaagaggattttcttctgcttaagtttcacatacatggatctaaaagaataaatcagaacctaaagtttctcttatatctaatcaattactatgtgcatacagccaaagcaaatccatagcttctttgagacagagctacataaaaattaattttagggcctattttagaagttccatttacaccaggtcttccttgtaacagaaggtgaatgaaaatgacactttccatttatatggagagtaattaaacaaactcatgtgagcagagcctgggttcttaccattatactgaaatgcaaaaaacaaaataagtagcattattatttcaactattattcacaactttaacaaacattaatggactaagtgtttcctttctaacccttgccaaatgttcatcacccatatccctgaaaactatgtatacactcaacaattcttccagaagactgggccagagtagtactacattccaaatgcttctcaatccctcaattactaaccaaacttttatattacacaaataataatagtcctatcatcttcaaatgatttctctatcatcaacctatcaatcaatcacatagcctagagcttattgaaagcttaaaaaagtgaagtgaaaatcactcagtcgtgtcaactctttgcaacctcatggactgtaccgtccatggaattctccaggccagaatactggagtgggtagaccttcccttctccaggggatcttcccatcccagggatcaaacccaggtctcccgtgttataggcggattctttaccagctgagccacaagggaagcctaagaatactgcagtgggtagcctatcctttctccagcgtatcccaaccaggaatcaaactggggtcacctgcattgcaggtggattctttaccagctgagcttaacctagcaattaatcacatagcctagagtttactgcaagcttgacaaaagactagtcaaaatgtcagtcttccattttattcattccataaattcagaattctccaagttgtatcattcatacatattttttagtctaatcaccataaaaagatagctgcacaaatcatttcttgatggcatattcttggaaaagcagaaaaatttattttggatcatttccttcaacaaatctctccacactttagactgtaatattaaagaacgtttttaagatttagaacattttttattttttttcttttttttttaaattaaatttatttatttatttatttttaatttttactttacaattctgtattggttttggcatagacattttttaaaaattcacaatttcaatattatcagcctttgctgaggtcctcttggcatgggccagatactataaagcacagggaacagaagaaggctgtgccagtcttcttgcccccaaggaattagaaagtagatgttctttcttttaatcaatttccatttgattctatgtccttttcactggcattttaaggattcatggaattggttacttgctttacatttctaagtagaaggcagataacagtatatcctaataaaccaagtatgtataccaggaaaaattctcagtaaatcctacaaaaatattcccatttagatatagtatccaaacaaaatgttctttaataaaaaatgaagtttggacttaactgactatatcatacaatacaatccaagaaaatttaatgttttacgaacccaaaaggaaataaaagtcttcaattattaacaattcttatgaacagtacaaatataatggattatgccttatattaacactttttaaaatatctcagaaattattaaaccggtatccaaataatcatagtatggaaaaaatagaaacttaacaagtttttctacaaaaaatgtcaaatatcctatcactcctagagcctttcacagtccccacagattttagcctctttggaaagtcctcatcatttctggagtttagaaaagagaccgaaaaatttttggtatggaaggaaagatgctcttgagtctaccaggtaattaacatcacacatgaaatgtaaaaaagaaaaaacaaaaaggctgtagaaatcacttcctattttgctttataatacaacaaaaaattaacaataattatctataacagtagttaacatttactttttagtacacttaattctactttctatatttctcaaattgtctaccatgaattggatttaacattttaaaaattcatttccttggagaaatgactgattcgagggctagagcatagaacacacaagataagcctggaacatcttgtaaggccaggaagtgggaaagggctcaaaacacaaaataatgtgggtatgtcaaaggtaaatggaagccaagtgatagagctgccaacagtcaaagcaaacacttggagcaacaaaataaacaatgtagtatggaatataacccaaagtataaaataaatatgtattgaggctatacttgtataaataaatgattaagtaaataaaggagaagagacgaatctcatattgtacatacataagtgttaacttaccaggcttgactgatgttctttgaaaggtttgctttgattggcccctggctaacatcaaggaacttaaattttaagaggggcccaccattcccagaggagaaggcaatggcaacccactccagtactcttgcctggaaaaatcccatggatggaggagcctggtaggctgcagtccatgcggtcgttagcagtccaacatgactgagcgacttcactctcacttttcactttcatgcattggagaaggacatggcaacccactccagtgttcttgcctgagaatcccagggacaggggagcctggtgggccgccgtctatggggttgcacagagtcggacacgactgaagcaacttagcagcagcagcgaccattcccagaactgaaaagagccgctcaattatgcctaaatttttggtacaaaaatatagtttatgctgaacaactgctttccttcagcaagtccaaaacggggtatgtgccatgtcagcagccccaataaaaatcctgtaatctgagtctataatgagcatcttttctatgaggagaaaaagaaagataaaggggaaaaaaaagattcaactggaacacagataaaacaaacagtatctaaaaaatacatttaatggctggtaccaggagaagattagagtctatggaagaaaagatcagtaagtatggagaaacggaaatattaactctacaaagtaaagtctaaatgataaaacaagggggaggaaatgcacaaagcctcagcgacctctggagcaatatcagatcgtctaatacatgttgtaatatgccaaccacatcctaagctaactgctggaaaccgacgacaaaagagaaaaatctcaagagcagttgaagaaaatgataaactacatacagtggaacaaagataaaaatgaacacgtttcatctgaaactatacaaagcagaagttgcaatgcaccctatcactgaaaagcttaaaactgatgacctataattctattatctggtgaaaatatcttgcaaagatcaagcaaaaacttttctgagacagacaaaaactgaaagaacttgtcaccagtagatctacatacaaaaaaatgttaacgaaagttctttaggcagaagagacaattataccggatgaaaacctgtataacctaaataataccatcgaaaacaagtgatggtaagtgtcagaaatggtacactagcaggaaggagaagaacttttgcttcttgttttaaattttctttatgttaattgactgcttaaagcaaaagtgtttaacaatctacaacaaaatcaggtttacactgtgtgtaaaaataaaacatttgactacaatagtacaaaggatgaaggggagaaacaagcgtaaagtttcaagatcctacagtctacataaaatgtactatcatttgaaagtagactacgatgaggtaaaattcattttttaaaccccagatttaaaacccctaattttattttaaaatttttaaataataagccaatagtagaataaattagaatactaaaaagcaaaggaggaggggaaaacagatgggacaaacagcaaacaactacaagatagatttaaacccaaccgtgtccctaattaaatataaacggtctaaccactgtgtgaaagcatcatgccaggtacaaaaaggataatttagtgaataaaacaaagcttgcgcccttgggaaggttgggatccaacggtgatgataaagagtaagtggtatgtgtgggtgtccatccctacttgctgtgtgcttagttgtctccgactctgggactcagtggactgtagccggccagcctcctctgtccacgggactctccaggcgagaatactggagggggttgccatgccctcctccagcggatcttcccaacccagggatcaaacccaggtctcccacattgcagcactggattctttacgatctgggccaccagggaagtccatgtcctacatatatacatccagatacaaaataaccagttgtgagtaagtgctgtgacgctaataaagcacgtgtagtgacagagaaaaaaaaatcagagaaggcctagctaagatagagtgatcagggatggccactcacagggaacaatatcaaatatgagatctgttcagcagtggaccttcttctgaagaatgaattttatgcttaatccccaaaaggaagtcagactgaaatcaacgtaactctggctgaccagggttagagcatcagagccctagccacttgcctgaggagattctcaaagaatccctgaaatacaaataggccccccacaaaatactgagttctataactggacgccataaggagctctaatcaagaacaaggtcagacagaccaacctgattagtgaaggggagaatggactttaaggagaacacagtgaaagctgatgggctatctatattgcttaggtaaggggtaaggactaaagagctaactagtatacaatcttagtggcttcccacgtggtgctagtggtgaagaatctgcctgccagtgcaggagacacaagagatgcaagttcgatccctgggtgggaaagatcccctagagaaggaaatggcaacccactctagtattcttgcctggaaaattccatggacacaggagcctggcaggctaatccatggggccgcaaagaattagacccaaatgagcacatacattcttagaataattcagaaaaaggaaataaaaatgggactaggaagacagatttcatttttctgaacaggtatttcttgatggatctggtgattgttagcatacagaagaaaaaaagaggcaaagctaaaatagtaaaaaaaaaaaaaaaaaaaaagtgacccttacacttaggtgactgggtggacagtggtactaaacatgggctggcaaggggtagtttgcaaggggtagcaaggagagttggggcaacataaatctcaagtctaaaagaggcatcagggctagaagcaagagaagaacaaagatagaagtacacagacagccactctcacaagtttcccagcttctccatttgtgaagggtgtaaacagagttcactacctccaagaacatgctagccaatactaaccacaaagtaacaaattcagctgaaaccaagaaaaataaaaacaagcaagagacaataatttaaaaatgaaataaacaaaagagtaatgatgggactcttcccctgaaatacaaggaccagaattccatctagatttctggagagaaaggattcaggtcgtgaccaaataaactacttattttagaagtataaatcaagtttctgaataatggtatataagagagtctctaataagaataagcttcagataatgtcacagattagatcaatacattagtgtattcacaagtttgcagcataaaagcaataaagaagccttttaactaagctctataacttggagagtggttacctatacagcaatatattattcaagaatgccataaggtataattactgttaccttcctgacacagggtattgattaatagcccaatttattcctagctttgaagttctttttatgtatttcacacgtaaaacaaaaaaactgcttcctttgcctaaaatgaagtagtccagaccctgtaatcatactttcttctctaccctcaaaaaccataccaatttgctatcatttggcccagtgctaagacattattatttcttgaattaaaacaaaaatctatttctgaatatatttaaaactgattcctgagttccttaagaactctagacatgagaaattaaatgtaatcgcctgaaattgcttttggaaaatacaggtaaaaaatccagatacaaagtttctagtcaaaaggttagttattggatttatattttttacaacatgcacaatgtatattcattggccccaaagaaactagaattcttactactaagatactttcattgtcagtacaggatatatagatgtactgagaagaaaaaagtgtatatgcattaaaactggtcaatcctactgggaaaatcactgcagatggcgagtgcagccatgaaattaaaagatgcttactccttggaaggaatgttatgaccaacctagacagcttattaaagagcagagacatcactttgccaacaaaggtctgtctagctaaggctatggtttttccagtggtcacgtatggatgtgagagttggactgtgaagaaagctgagtgccgaagaattgatgcttttgaactgtggtgttggagaagactcttgagagtcccttggactgcaaggagatccaaccagtccatcctaaaggagatcagtcctgggtgttcatcggaaggactgatgctaaagctgaaattccaatactttggccatctcatgcaaagagttgactcactggaaaagactctgatgatgggagggattgagggcaggaggagaaggggacgacagaggatgagatggctggatggcatcaccaactcaatggacatgagtctgagtgaactccaggagttggtgatggacagggaggcctggcgtgctgcgattcatggggttgcaaacaatcggacacgactgaacgactgatctgaactgaatgggaaaaataggtaaaattctatggaccataattgaaggtgaacttaagatgtattgcccaaagaagaacttttctgaatgtgaaaatgggcactagctagtaacaacatgtcagaacagagatgtaaaccattaactggccaaggtcaatggagaccaatggtcactttctccacgaagcaccatcacaaagcaaaggctcatgacttcctgccaacattgtctttctaaatttttcttacattgtcagtagcacaataagttttcaatgaactagaaatgtttattgttagagccactttttaataccattcttacttttaaaacaaaagggtgaattggcaaggctgtaataaagaatacgaaaggaaaggaagtaccaaactgcagaggcaaccaaatgtaaagacaaaaattacacttaggaagtagagtaccagcaattttaggaagatgaagagattgttcacggtaattaaatgggcaagcctgaaacccaggaaacgtttatgaatgatcaatcttaatcacaatgtattatactgtattaaaaactaatttggaagaacctaccttcgtaaggtttatattctttaaaacctcattctaaaccttgtaaatcagaacccacttctttataagattccctaggtcattcttaagcacagtaaagcttaagaagagctaattttaagatatattaatataaaatataagatatactgatataaaattatcttgcttatatcattttttagcacatctcttattttaaaataatagcacatatttatttaaaaatagagattaagaaaattcagagccctaagatataataaattttctgcattccttataaagagctttttagagttctttttaaagtttctagaaatatatgccagtttatacttcttaagaacagtgtaagagatcactggatggcttacctaaccttaaacaatcactctttagaaacagaaattctgtcaaaaaatgtatgtgtgtgtgtgctcagtcatgtccaaccctttgcggccccatggactgcagcctgccaggctcctctgcccatggaattttccaggcacaaatactggagtgagttgccatttcctaccccagggatctgcctgacctagggactgaagccatgtttcttgcatctcctgcactggcaggcagattctttaccactagcaccatgtgggaagcatcaaaagtttaaataaaagtagactttaaaattcagttaatgtgccagtaatttacatctataatatttaaaattattttatattattacttaacagtttgaataaatcaatgatagaatgttcactttgctgatatggcgtttggtaaaacaattctcaaaggcggactgatccccgtcttgatcaccatctgtctttaaagaatccttgtattctaaaaaaagaaatatgcaatggattacctttagagttaatttattctatttaaaaaatgactaggtttaaaaaaccttatggctaaagtaaggcaaggtacatattctatccacatatgtagcaggatggggtgctaaaggtggttggaaagtacaggtatagcctagtagacaatgagttccattatggaaaggtccataaaacaagatgattgataaaaagcaactattttagaactccacatcagggtattaagggcatacagaaaatctgttaagccaacaactgttatctttaaagaatgaaccatctggccttccacaaatagagaatcaaaaaaaatttttttaactgaagaatctttagagatcttgaaacatagtccctcaaatcttagatgagacaactgaagcccagggaggataaatgatataattggatccaaatcaaattaatgaatatttaatgaatacctactgtggataacacactattccaagagttacagaaagtaagtataacagtggagcccttcttcaagcagtccgttctctacttcccaggtaaatcacctgtatgtagctctctgatgttagcaacatccttttccacattctagcttagggccggaacacttaggtccctagaccaaatctggttcattgcttgtactgaaacacagccacacacattctttcaccatccaggcttcttttgctctacagagtcaaagctaaacagttatgacagagacttatggcccccagatcctaaaatatttactacctggctcttcccagaaaaagcttgccaatctctattctagatcactttttgctttgatttgaaggtgttttttcccccaccttttttccttttcaaactaatggaaggctggttttgcctcaggaaccactgcccactgagcaatgtgctagatggttttgaaggaaaaagtcagtgagctaaatatggcaactgacagcagctctccataacaagtgaaaacttgctctggcacataaaggacaagaatcaaaggacagaagactcttaactttcaaccaacatttaataagtgcttactaagtgcctgccatggggctaagctctggggctacccacatagataagaccaacttagttctcaaagaattcactacctagaaaaagaggcaacacttttatattgaatggaataacagaagctagtggacaaagacagagaatagttaactgaggttaggggtgacagcaactagctaaccccaagaacaaccacacagagacttctatttcccctaccgagttccagctgcaggaagtaagcatgattagaaacttatagctacagattgttgcctcaacccaaaggccacaacttataggtgggtggagttaacccttggactggatgttgcttcctgaattccctttatagcacactttatttttgtttaacctttctagtataattcttttagttacattttaaatttacattcagctttagtcatcttaacctgctctgctgtgcatgttttaacctctatattctttttcagaatcttccaatatggatattattttttatcaatttttcatctttttatgcattatttctaatatttgtttatatttttcttatccccttttgtttcaactattttatcttaaacacgctattttctgccttttgtttctctaactgagaataagcaggagtgatgatcaaaatagccaccaggaaagtatggtaactgaacaatggaaccagctcagcctcagagtggaggtgggtccagggaccctggtgtggcgaggactcactgattagtttatgaaacttgaggtggtcaaggtcttcccttacagctcagttggtaaagaatccacctgcaatgcaggagatcccagttcgattcctaagttgggaagatccttgggagaaaggatcgtctacccactccagtattcttgggcttcccttgtggctcagctggtaaagaatctgtctgcaatgcaggagacctgggttcagtccctgggtttggaagatcccctggagaagggaaaggctaagggggtcctggggtagggcaggagggctgagactgcaggaacacttggggaaggatgtggctatagctgaatatcaactgatagtagaaactgcagtgttttaacaaccggtatcaccataccagtgttgatactagatcaacatcagttctgtgattaggaaaacaacagagtaagtgggatagagaagaaatcattgcaggcctcttaaaaatggaaacagatacatctctatttcagctaattttcttgcaagtcctttctaaaaggacattacaggcggacttctaaaagtctttctaaaagccaaagaagtaaagacattgcccctaattctagccacatttaactgccccgattttcaaaaatatatatccatgtaatttgaggagacagttcaaaattacccttcttaagaagtcttaggtgaactttaaaaacagccaagagaaactactgaagtaatactgttacaccaacttctaaaaaccttcatatctgaatcacaagaccatttggccgtagctatttggaagagtgcacattatagacaaagaaggaaagcacaggagaaggtgttgcaactcaagctcccatgatctgtcatgaagctataaatcacatgctaaaatggttcagaattatgcacaatgaaagacctagatccaaattcctagaatgctttctatgatggaatgctccaaagataaattctagctaaactgattcatctacctccaagtcaaaaatccaaaattctttgtaaacaatagtagccaccatgtatggaactgtgtatcaatttcattgccatttttggtaatcttaaaaacaatgctacatagaaaatatcattcaaattgacaggtgaagtcaactggcttagagagattaagtagcctgttcaaggacacatagccagtcaccagtggagctcagctcaggttagatcaaagcccccactcgactctgttctaaatacttcactgcctctctcctctcacacttggaggtctttccaatatcacttctctatcataagaattctcatagactcagagaaggcttgaaagtaaccacccacaagatttctcctacaaccttcagtaagtactgcctgaaaagtaaccaaaggcccacttaaggaagcagtcctacttgatttcaggacaagaccctgacgctggggaaggttgagggcaggaggagaagtcggggacagaagatgaattgtttggaaggaatcactcactcaatggacatgagtttgagcaagctcagggaaatggtggacagggaagcctggcgtgctgcagtccacagggtcacaaagagttgtacatggcttagttactgaaaaataacaacaatgaaaagctcagcacttccaaatcccatttgcataaaaaagaattcttgaactccttcagacacttacacatgaaaacaagctatcatttgggtcaaatcagaaattctaaagcagactgaaaatgacctggagctcaagttcttccatgatactactgcgcccaacaatcttttaatgacatctgaatttcaaaggattctccatctcttttggtctgttagcatttgaaatggcaaaagaaaaacttcatctcgattttctcacaagacgttctctaaattccatattaataatctagtctttgatgaacacttagaacactctttactcatctcattcccatcttaaaggaagctggtctgccatggtattcctctacccaatacaggctgtatcaaacaaaagcaagttattcaagtgacataaaatctaaccactgagagcaatggttcgacaaaaacaaaactaaaaaggtcacttattaagaaaatccagttggtaatagttagcatcccccattcttcactagtcacttcttcactagtcagttcagttgctcagtcatgtctgactctttgtgaacccatggactgcagcacaccagctatccatccctgtccatcaccaactcccagagtttactccaactcatgtccattgaggaggtgatgccatccaaccatctcatcctctgttgtccccttctcctcccaccttcaatctttcccagcatcagggtcttttcaaatgagtcagttcttcgcatcaggtggccaaaggattggagtttcaacttcagcaccagtcctttcgatgaacactcagactgacttcctttaggatggactagttggatctccttgcagtccaagggactctcaagagtcttctccaacaccacagttcaaaaccatcaattcttcagcgttaagctttctttatagtccaactctcacatccatattgaccactggaaaaaccatagccttgactagacggacctttgttggcaaagtaatgtctctgctctttaataagctgtctaggttggtcatacggagaaggcaatggcaccccactctaggactcttgcctggaaaatcccatggacggaggagcctcataggctgcagtccacggggtcccgaagagtcagacatgcctgagcgacttcactttcacttttcacttttatgcactggagaaggaaatggcaacccactccagtgttcttgcctggagaatcccagggacgggggagcctggtgcgctgccgtctatggggtcgcacagagtcagacacgactgaaacgccttagcagcagcagcaggttggtcataacttttcttccaaggagtaagtgtcttttaatttcacggctacagtcaccatctgcagtgattttggagcccccaaacataaagtctcttactgtttgcattgtttccccatttatttgccatgaaatgatgggaccagatgctattatcttaaaagttttctgaatgttgagttttaagccaacttttttcaactctcctctttcactttcatcaagaggctctttagttcttcttcactttctgccataagggtggtgtcatctatatatctgaggttactgatatttctcccagcaatcttgattccagcttgtgcttcatccagcccagcatttctcatgatgtactctgcatataagttaaataagcagggtgacaatatacagccttgacatactcctttcctgatttggaaccagtctgtcgttccatgtccggttctaactgttgcttctttacctgcatacagatttctcaggaggaaggtcaggtagtctggaatacacatctctttaagaattttccagagtttgttgtaatccacagtcaaagcctttgacatagtcaataaagcagaagtaggtattttcctggaactctctcagtttttgatgatccagtggatgttggcaatttgatctctggttcctctgccttttctaaaaccagcttgaacacccggaagttcacagttcatgtactattaaagcctggtttggagaattttgatctttaatttgttagtgtgtgagatgagtgcaattatgtggtagtttgaacattctttagtattgcctttctatgggattgaaatgaaaactgactttttccagtcctgtggccactgctgagttttccaaatttgctagcatattgagtgcagcactttcacagcatcatcttttaggatttgaaatagctcaactagaattccatcacttccactagctttgttcatagtgatgcttcctcacttgacttcacattctaggacatctggctctaggtgagtgatcataccattgtgattatctgggtcatgaagataattttggacagttcttctgtgtattcttgccatgtcttcttaatatcttctgcttctgttaggtccataccatttctgtcccttactgagcccatctttgcaggaagttcccttggtatgtctaattttcttgaagagatctctagtcttttccattctattgttttcctctgtttctttgcattgatcactgaggaaggctttcttatctctccttgctattctttggaactctgcattcaaatgggtatatcgttacttttctcttttgccttttacttctcttgttttcatagctatttgtaagggctcctcagacaaccattttccctttttgtatttctttttcttgggaatggttctgatcaatgtctcttatacaatgtcacaaacctccgtccatggttcttcaggcattctatcagatctaatcccttgaatctatttgtcacttccactgtataatcattagggatttgatttaggtcatacctgaatggtctagtggttttccctactttcttcaatttaagtctgaatttggcaataaggagttcatgatcagagccacagtcagctcccagtcttgtttttgttgactgtatagggcttctccatctttggctgcaaagaatataatcaatctgattttggtgttgaccatctggtgatgtccatgtgtagagtcttctcttgtgttattggaagagggtgttcccaaagaccagtgcattttcttggcaacactgttagcctttgacctgcttcatgctgtacttcaaggccaatttacccattactccagatatttcttgacttcctacttttgcattccagtcccctataatgaaaaggatatctttttggggtgttggttctagaaggtcttgtaggtcttcataaaactgttcaactccttaaaactcaacctaaaagcatttggaattttataactagtgctacattttgatttcttcctcctagggaactatgctgaacacctcaagagagatataccagcgttctatttaaatgtttatattccatgaagttattaacactttgtaatgaaatgaaaatggtatcttaatgtgagcctcaattgtttttactaaagtcatgtgaaacagctatatacttaatcagcttacctaaccagagtgttataaaaataattatcaactgttcattaaagtgcaacaaaggatctgaaagagatgcagatacatcaaaattacagtattttcctattgaaatatcactcttaattaaaatgaaagcaccaaaagaaaaaagtatgtgttccttagtggaacaatcaatcttgatagatatactagtgttttaaaaaatatttcatacataaagattcaaaaacatcaaacacagccatgatgtagagtaaaaggacagtggcattactgtatcacttggtagccaagaaacctcaaataatttggttaagccttcctgaacttctaaaattttgtgtaacaacatatcttacaggattttcatgaggacttagataacatctgcttgctgctgctgctaagttgcttcagtcatgtccgactctgtgcgaccccacagatgtaagcccaccaggctcccccgtccctggggtctccaggcaagaacactggagtgggttgccatttccttctccagtgcatgaaagcaaaaagttaaagtgaagtcgctcagtcgtgtctgactcttaggaaccccatggactgcagcctaccaggctcctctgtctatgggattttccaggcaaaagtactggagtgggttgccagtgccttctccaacatctgcttatttaaccaatatttattgagcaactattatattccaaaccctgaaacacatcagtagacagagcaaagtccaatgctcaacttatattttatttgaggggaaaaaagagagaggtatgcattaaatgggtagacaaatgagaccatttaagtaattggtaaattagagcaagaaaacaagacccagaataataaggtgctcaaataatgttgatacatactcaattctgctcaatttctcattatctctgttcttggtgaattataaaactcagccataatatatttacactcacttcttgactataaacagaatgaacaacaagaaaatcaaggttgattccatctgaataaaaataacccaaccctggagatacaaggattttgcagctgttacaacagaagcctgtgaaaacacactgcctgattcttaggatctgactcatacctatgcctaacattcattctccttcaatggtcagtcaacactgtagtatattctgaatcagtgaagcgcattttcccctcaccaactcttatgcctgaagatgaatattaatattagtagaactggcatgaataatatctatcagaaaatcagcctttgattacataattaggactctacacaaaaagtatacagatatttgaggatttatgaataagattatataacatgaacacaggaaaattgtaattccttttcctcattaaggaaataggttagcaaataaaggatttactttgttacaacaaatttacaacattatacagccatataaagtagagtctctttactgtaagttgcaactgttagctaatcatttaatcaaatagctccattacagtaggaatcaggagggaaaaaatcaataggtctactaaaggttttaacttaaacataaaatccatgtttattccctagctttctgatgtagtgccttgtctcttaaggtgaatttgctgattactcaattattgtctttctcgtctagattccagtccatgtatatcacctatgataactcagtctcaatttcttcaaagtggagtgggaagttaaagggctctaagggcaaaatccttcttgaacacttctctgacctacgtgtaatttaaaacaaattttcttgaggaattcacttctgtggagtatgaccaaagtattcaactttgtttataccaaaataactttcttttcagcctcagattttcctgagttatgtgatacctaattaaaatacatgatcacaattacaagtataattggcataaacaagtttggttgaaaacacaagtcttggtaagcccacaactaaacttgtcaggagcagaagtggtggcaggggacttaaatggtgtacagtgtactacaagcaattgttaatatattctacagagaaatagaagattttaggtaaattcagtgggttgtttgagaatttctatcaacttttaaaacatcaggtcagttaatgtttagagaaagttgaaaaaatgaaaaaatttatcaaaagcaaagaaaaatgttcttcaaaatatcaacccctgcaaatatgcatatttttgttaaagaaaccataaacatctataaatacttctggagttaaaagacacaaggtcaatttctatatactgcaaacttattctcaatttgtcctctcacaaaagtacaattatcaatccatatgattgatcaaatccaatctaaattccttagaaataactttttttattttgaatgaacaatgaaaaaaggtggaaacaactgacccaagtacaaagctatgagattacataccagtttttctctaaaagagtactttcttctttgccctactgatatgaaatctcttcatactcttggtttctcctttcattagcaaaactgtaacaccctttaaaagaactgtacccagttctttgcatcacttctgaataaactattgcattatctctatcccagaaccaccagcaaacaggaggtaaaatttattcatgctgagctgcaagtaatcaatgtgtagactggtgttaatcatgtgcacagactggtgtaaaacatagtatcaaattttgagattaagaaaaggactttattggttaagtgaaatttaagaaaccaaatctttttacagatattgccaaaaaagtccattaaattaattttaataatcatttcctaaaattgagatttatttttgaagagaaaaacgaggtaagagcaattccacaaaggacttgtagcctctgaaatgtcaaacaacagattcttcagttgtttcagttccataattttgctttattttgactgattggtaaaaaagatatacagtaaagaaagtcttttaactggcaaatcgaatgtttttttgcaaattaatataaattataaaatctcattattataatttataacatatatactatatccaaaaatatgtaaaatagtcttttaaaataaaaaaggagccatattaaactaatgggcataggatattacatttaaacacaggtcccttatatatgagtttgagcaagctctgagagctggtgatggacagagaagcctggagtgctgcagtccgtggggctgcaaagagtcggacatgactgagcgactaaactgaactgacagtgaagaaagcaattaaatggttcaagattgaaagctaaagactaaatttctaataacataaataaccatacactaacatattcatattgcttatttatgcatatctacattatcgaacacaaaactaactgctgaatgattcacagattttaattgaaattaagagtcactttattttgggggctccaaaatcatggcagatggtgattgcagccatgaaattaaaagacgcttactccttggaagaaagctatgacaaatctagacagcatattaaaaagcagaaacattactttgccaacaaagttccgtctagtcaaagctatggtttttccagtagtcatgtatgcatgtgagagttggactataaagaaggctgagcaccaaagaattgatgcttttaaatcgtggtgttggagaagactcttgagagtctcttggcctgcaagaagattcaaccagtcgatcctaaaggaaatcaaccctgaatattcactggaaggactgatgctaaagctgaaactccaatactttggacaccagatgcaaagaactgactcatctgaaaagaccccgatgctgggaaagattgaaggcgggaggagaaggggacgacagaggatgaggtagttggatggcatcaccgactcaatggacatgagtttgaataagctccaggagttggcgatggacagggaagactggcgtgctgcagtccatggcgtcgcaaagagtcagacacgactgacactgaactgaactgaactgaagtggtctcacctccattttatacactcaaatgagtgaagagtataaaaaaactaacttctactaccagtacattctagatatcaatatttaattcttcttaaaagttccttctcttttcttctacataatattttaacagaaagtatggtttcttctaaatgactctgtttttcaaactgacaagaaatagtattaaggagaatacaaagaaatagggatactgccctggggagcttaaactgaaatatctttgaaaggtaacttggcattgtctatcaaaattttcaaggcacacagaaatttatactaagaagcaatcatacaaaggcataaagtaatacgataagtggataatacataaaaaataaatggatatttattagataattacttctaataattaacaactaaagtcactctaagtgttcatcaataagggactgattgaataaactattgtatcacacaatggagtgcatagtttaaatgagacagaaaaatgtttatgaggcattaaatgaaaaagcaagtatcaaaacagtttagatagtaaatatcatttttaaattatataaataaaatgcataagtgcatattaaatatacatggaaaacagctgtaagaatatatgtgaaactttcaaaggatttagagaaaatcttttctttctactaaatattatgttaatttatatgagcagttaaatattccctataataaaaatcaataatcataaagaacattttaatatcttaaagtgttttaatcaaaatattaaagcacacatttttcttcatcttcctaaagattttctttttaaaaaaatattttctagctactatatgcatatatgattgttctcctaacacatgagtaccatgctctcaaactttaaaatgcattatattcaactttgcagaattatatgaaacaaaggtactgtgacacaaaataatcacaatcatattcaaagtcgtgggtttttttttttttatagttcacctcaaatactctttatcttttagaacaaaagaatggaacttttaaaaaaagtgatttctgtaatgatagataaacctcagtatcttctttttcacttatatatcctaaaggttgcaacagtaacatttttgtcaataagcataatcaaaatattttccacaatcattaaactcttaacttcattaatggctttatcttgatctgcagcaatcaatatttctccatctcaactagaagcaatcaatatttctccatctaaatcctaagcaaaatttcagatactaaaaacatttatgccaactatatatttactctattaaaaattttttttaatatttaaacttaattttcaaataaagagttatgctcactagaatacataattgtaaaaataattttattttctaaaatactttttactaaaagattgaaaacacatctttactttacctagttgttgatgttggtgtttgtcataatgactgtgacagaaatgggttccaccttcctgatctactgtcttctctgacgaaagcaaaccgagacgtttcaatttcagtaatcttggagaactttcctgaaaactctctccagggcccaaaaccatatctcccgaaacaacaggaggaacaactcttttcaaaaaatccatattaaggttcttctacattactggacccacaagtacacagacaagtatttgtaccaacttcctcgatgagaagcttaggtccactctttgtgtcaaagagcaaagaaacgtcatatgaacttaggtgggtcaactaccagctgttttgaagctgatttttaggacatttgctgttcatactgataagaagtgaaacagctaccagctgtgaaactgcacttcatatatacatatataagtacatgtacaatgggtgggaacagcaatattgagactataaaatggttagcatccatctagtttaacgtttagactttgaaaacctacactgtgataatgttaggacaaatttactttggtctgaggtgtgtcttacttttaaacacacttaacagctgaaatgtgaaacagtaacttgaattcaaaagataattcttatcattccggaaattcactagcagactgcaggaggatcaagttttatagaaggtgaaaaggagtaatttaaaactatactgtatcatcaacatcccaatgtacttttatttttattttattttctgctgctgtggttctgctttactttctggtggttgtttcatttaaaagtttatcttttctaatacatctgtgctggtggtggtttagtcaccaagtcatgtccgactcttacaaccccatggactgtagccttccaggctcctctgtccatgggaattctccaggcaagaacactgaagtgggttgccatttccttctccagggaatcttcctgacccagtaatgaaagccaggtctcctgcactgcagacagattctttaccaatctttaccaatgtacttttaaacacacaccaaaaaaacttgttcattataatcaatcataagttacaatcttaaaaccataagttatctaaaaaaaaattgataatttaaaatatatgaacctaagaaaataaaattgaacagtttaaagtataaatatttaattcaataaacccagtaatcaaccttacataatttatttccaaataactaagcatcctattaaatattttaaaatagcaaaagtaactgatcctactgccttattgtaatccagaagcatgataaaatgtgccagtgaaaggtactaaataagactgtgcactttaatatcttcttttctccctttctttgcctgccctctggtggggttactaagtgaccaagaaagaaatgaaaacaaacaaaatgaacagataagacataaacttccctaagtagtcaaattgataactttgaaggatacacacttaagagaaaaaaaacaaacctgattcatttagtgaaacacaatctttttcttccagcactcagtaggaagagaatgatctacatatattaaaagatgaagcataaagttgtctacatagatatcaaggaaattgctgtaatataaaaacaagtaaatttctggtctgaattgtgctgtgcttagtcgctcagttatgtccaactctttgcgaccccatggagtataacccaccaggctcctctgtccatggggattctccaggcaagaacactggagtgggttgccatgccctcctccaggggatctacccaacccagggatcgaacccaagtctccagcattgcaggcagattctttactatctgagccaccaaggtctgaatagatgagtttttaatccttaacattaataatgaagtcaattattctctatttcattcatttaaaagatattaagtaaaaatcctctatacataaagcattaatatattattaaggttcagaggaaatttagaggatttattcatgcaaatcctgtctcatggaattctacagtaaaaaggagggaaaaaaaacaaggaagtcaagtaaaggactcaagtttctcgccctaaagcaagactataccaactagaaagaaacactgacttaaaaaaaatccttctcagaagtagattctctcttaaccctggagcacagaaggataaaaattcatatatgatcatcctattgccaacacactgtaaaaacaaactagttagaaccataatccatgtcctttaataacctagaagttatccctatatcttcccaggtttttatttttgtttcttccatctcacctcattcatattttttaaactgaaggacaactggcttatattagtttcaggtgtgcaagatagtggtttgacatttttatatagataattatgaaatgatcaccatggtaagtctagttaccacctgtcacacacacagcattactacaatattactgactatattcctatgctatacattacatctccatgacttattttataactaaaaatttgtacctcttgatctccctcaccctatctcacccatatccccatgccctcccctttggcaagcccctgtttgttctctgtgtctatgagctatttctgatttatttgtgttacttttttttgtttttgagattccacatataacgaaatcacatggtatttatattcctctgtctgacttactttacttaacataataccctctagatccatgctggccttttgtttgcttcctctttactgatatggtctcttgttctttaaaacttagttcaagtcccttgtgtccaactctttgcgaccccatggactatacacagtccatggaattctccaggccagaatactgaagtgggtagcctttcccttctccaggggatcttcccaacccagggattgaactcaggtctcccacattgcaggtggattctttaccagctgagccacaagggaaccccaagaatagtggagtgggtagtctatcccttctcctcgaaccaggatctcatatactgcaggccgattctttaccaactgagctacaagggaagccagcacatagaaacttatgtgtgttgtttttctcaggtccctttgtaggtcttccttatctgtggagcccaggaatacagtagtatgcaacaaacacatgctgattatgaaggcaagttaccttcatgtttgttcatgatatacaagacaaccacacatgtcactgttaacctcactgttctaaactacactttcagttggaaaaagaaagggcaagggttaggtgatataggagagaccacaagatttttttttcagatttccttcttttaacaactgtttgctgagtagcttctttaatagcctgtgcatgatgcaaatgcactaaggatttatcttcatccccaggaagcttaactctcacaactacaagactccctgtttggcttggccaaggttttgttgagcctgcaatatgcttcaatttcttctgtccaataacgtcctttctttgcaggtgtggattcctaataaacatctaggagccaaactccttttcagtgtcagcttttggaggaccatccctgagacataacagcgaggtataaagcatgggcctgcaatatccattactagctgaatctatgacggcgaaatgccataaagctatttctaagatctttggttgattatcaaaactttgaactcttgctataacagttaaagaattaagaaattatagcagttataaattataactaacagggctagtcattcaaagacagcatttaaaaatcttttgagatctgtaagtcactatttcgcctttagaatatttattatgatcttaccgtagaattcaagacaataatttcttggtggtaagctggatcatctaatcctggctgtgggactcttcagcagttttgagaattaagcagttaggtgttaatcatccaagattaaataaatggcttcagctctgaagaaaaacaaaatatgagattgatacattagacatgtttataagtacatctgtgtgtgactcacatccacccttacttatgaatatattatactgcagggtcactagctgctacagttatcctctttcaattagtgttatgttttttctaagtttttattatgacaattttcaaactaattcaaaattattgagactattatgatgaacccactcctatcaactcatggcaaatcctattgcatttacatcttcacctacccctcaacctctatcccaccactctgggtcattctgaagcaaattccaggcattataccactttatctatagaccattctgtatgtctctttctaagacaaagatttgctttataaacataaggcagtatcattgtaatatctacaattaattcacaataatttctttattacatcaactaccaatcagtgctcatatttctccaactgtctcataagtgtctaattcaaagctaaacaaaatccatacaggcaattgttactgtttctcctaaatcccttttaatctacagttggtttttttttccccttccattcttctctttgcagcaacaaacaaagcttttactagacaaaaattgaacaaatacatcaataccctaactgtttaataataaattaaatccattttcattttattcaccaaaataatcaaattttcaaaatagttcatatatccactaggcctaatattattccatctgcagacagtgtttatggtacacatttttcaaagtccaactataataactctgagcaggtcctggattatgaactactataccttatatgtaataatttgatgactactaagaatgaaaccaatgaccagaaggagttatcctttaactgcatataaggcctcacatgcaatcaaatacatttcatgtttgtagtaccatgaaaggttgtgcatttttcaataggccacattttaaatttgtcattgaaccacaaatcaatctcattttaaatcacatcctgtttctattttcttgtttaatgaatttaattcccagccccaaagaaagaactacttcctaaaatactaattgtgtacttaaaagttcttaacctgaaattcctttagccaagttagaaaaatataaaaatatttcatttattcacaagcataatcagctaaattatgactaaaaccaaatctctgaagccccaaactggtaaatatgaaaatactaatttaatatagatgtacttgttcataatcaattatcattcagacttatgaatttttaactgcctcaccaaatatttctgcatctactaacaacatggtatctacaatcccaccataacttttgatactttatcttagtttcatggaatcatttctccctcaaagcaaataaaatttatgtgacaaacagcatatcatttcttgcctacagtgagcagagcagtcatgcactggtctgtatttaatgaaatttatactatttttgttttgttcaggggtagtatgggggtttttgttggtggtgatgggtttttttgggggggggcaggtcaattgtacttttatgttctctccatatagactacctaaaatggaacttttattttcatttcacttgattaatttggagaatagtttatctataagaagagtagtttttttgggggggttcacattccacagcacatgtgtccttagtttcctgaccagggattgaaaccacaacccctgcactggaaggcagagtcttaaccactggaccactggggaagccctgaaaagaataaattttattactacttctatacaactacttttgagatggtcaaggtcagagaggtcaggtaactgcggtcatggtatgcacatgaccgatcctgttgtttcttattttaaaagaataagctcgtatttaacaagagtgacttaaggaggtcagatggcatttgacaacactgaaaagaagactgtaaattagtcaaatagcacaagctttaaagattcaaggctttaaatcagcaataagactaaggatctagaaccttccatgtgtaataaagagaacagtggcccagctctgcttggaaggattctcagatcaaatgaggtccttaagggacaactctgtttcactttagtctagaaagtaaaagagaaagttgaataggtgctcaggtaacatattaacctcatttcctttctgaaaaggattacaagaataatgaagaaaagaaatgccacaaatctaatataccctagctgtagtaaaacttctgacataaaaatctctgatatacattgatgcagaaaattataatcttgaacaaatagagcagaaattaagaaaaaatgagtttcagtaatgttcaatgtaagtactctcaatatttacaggcttggaatacttcataatctgaaaacgagaacaagaagttatggttccaagcacaaggtaaacttgagctcaatataataaaaagaataacttaattattatatgattcatttaaaacctgcttcataaagaaatggagttcctgctgagtttttaggtaaagattgttagaaatgctatagaaagggttataccactgagtcaaaagactaagataaattacttcatattccaacttgaaatcctaaatttcactttaatatatattttgtacttatacttgaatactgggaagtgtggtgacctaaagattcaatcatatttcaactaaagaaagaaaccacaatgtaagatattaaacctataacagaaaacttcagtctttctattaaaattattctgggaatattggaagacctctttaaatgatgcaaaagaccaaaatgatgcaatgattttcaaataatttagaataatcatagctcctatctataatggcaaaataagtatgaaaaatggaaaatgaaatatttttttaatctgccaaagattatggaagatgtgaaaaatctatgcacaaagactcaagtgtaggtagcaaataattactcaaattatcctctttgtctgactgacaaaagttattaaaataaagaatttatagtcatccctttaattaagaaagaaaattaatgattcataaaccaacactgactccactacactaatttttagaaattcattttttctcttactttataaatgttttaatttttacaatatctaaaacaaacctgcattttaatcttctgtcattctttttaaccttctaccaaatttcaacttttaagaagtatggaaacttacgatgctgactaatgcaagcatggattacacaatatcacctgctaaaaatgctgtataatggcactgagctagaataattgggctcactgcaaaaatctaaatctcttgctgataaagcaatgttctctgcaggtaaatttttctatattttgttgattttacatttttagcgaaaataacaattatcatactacttgtattaatgaaaacaattaggaaaattttccattcataaattcgaagggaaggtttctgtaacagtttcattcactgaatcatacagacatagccccaaagtacattttctagtaaactggtgaatgaacatgtattgtttagaataattttccttttacatttctacagcattacatttctatagtatttctaacccattcaacagcatttctgttggcacaggaaaaaaaaaaaaaaagaactagatcacaaaactatcatataagtcccctgctgctgctgctgctaagtggcttcagtcgtgtccaactctgtgcgaccccacagacggcagcccaccaggctcccccgtccctgggattctccaggcaagaacactggactgggttgccatttccttctccaatgcatgaaagtgagaagtaaaagtgaagttgctcagtcgtgtccgactcttcgcgaccccatggactgcagcctaccaggctcctccgcccatggggttttccaggcaagagtactggagtggggtgtcatcaccttctccatataagtgccctacctactcatttagacttaaataagaagaaaatttttggacaaatgtagaaacaacccagtaagacatcatgtcactaaatctggaattttctcccatccctaatttctaaaaatccattgctgtaacgatgtatgccacacatgaatttataaaaatcatacctttaacaaatattgagcagaactatatgccaagaatcagggacagaagagtgaacagaagagacaaaaatccctaggctcacagggcttaccttccagtatcagcttgaattttttgtagtccttcctttgagaatctgaaaaaagtattggcggcctctacttccaaaatgtaaacacagtgaatcttgcagggttatgaacctctataatccaattactaattatggattaaaaatccccgataaaaactctccttatgcttactttctgtctgccatttatagttgacagtgtcataattttactattcatagtattaagaagtaatacagtcatccttctgtatacaggagataatggttccaggactccttgtggaaaccaaaagcatcagatgctcaagtcttttatataaaagtttatagtatgtataaataacccacgcaaatcctcctatgtgctttaaaccctctctatattcagttcagttcagttgctcagtcgtgtccgactctttgcgacgccatgaattgcagcacgccaggcctccctgtccatcaccaactcccagagttcactcagactcacatccatcgagtcagtgatgccatccagccatctcatcctcagtcgtccccttctcctcctgtccccaatccctcccagcatcagagtcttttcccatgagtcaactcttcgcatgaggtggccaaaggactggagtttcagctttagcatcattccttccaaagaaatcccagggctgatctccttcagaatggactggttggatctccttgcagtccaagggactctcaagagttttctccaacaccacagttcaaaagcatcaattcttccgcactcagccttcttcacagtccaactctcacatccatacatgaccactggaaaaaccatagccttgactagagggaccttagtcggcaaagtaatgtctttgcttttgaatatactatctaggttggtcataacttttcttccaaggagtaagcgtcttttaatttcatggctgcagtcaccatctgcagtgattctggagcccccaaaaataaaagtctgacaccgtttccactgtttccccatctatttcccatgaaatgatgggaccagatgccatgatcttcattttctgaatgttgagctttaagccaactttttcactctcctctttcactttcatcaagaggctttttagttcctcttcactttttgccataagggtggtgtcatctgcgtatctgaggttattgatatttctcccggcaatcttcattccagcttgtgcttcatccagcccagtgtttctcatgatgtactctgcatagaagttaaataagcagggtgacaatatacagccttaacgtactccttttcctatttggaaccagtctgttgttccatgtccagttctaactgttgcttcctgacctgcatacagatttctcaaaaggcaggtcaggtggtctggtattcccatctctttcagaattttccacagttgattgtgatccacacagtcaaaggctttggcatagtcaataaagcagaaatagatgtttttctggaactcgcctgctttttccatgatccagcagatgttggcaatttgatctctggttcctctgctttttctaaaaccagcttgaacatctggaaattcatggttcacgtattgctgaagcctggcttggagaattttgagcatgactttactagcatgtgacatgagtgcaattgtgcagtagtttgagcattctgtggcattgcctttct

SEQ ID NO: 130 - DNA, 231729 bp, Hippotragus equinus
  source 1..231729: mol_type = genomic DNA
cccactctgtgtcccagccccactgcgcacccggggtgtgcaggggcaggccagcgccggagcggctgacttttctctgaaaaagaaataagctacaggatgagttgagtggtttacacggagactgtggaattgtggggaatcaccaaaccgtaagcaccagttttaatcaagtttgttttgtgtcgtgagatctttgattttcattttgttttcctcgggtcggctcgctcggcaggcggctctgccccgagcccccgcgggctccctccctccgcggctgccctggggggcccggagcgcccgctcccgcacgtccgtgtgtcggcgcgtcccggcgtctgcccgggtccggcaggcagagggccgccggctgcggctcgccccgccgcgcccgcgggctcggaggaggccggcaggacgcagggcggcagcaacgtttctcggcggagcttcaagacggagacagacaaacaagagacccgcagctgcgggagcggctacagaggcggctcctcttccatgggctcctcgtcggctctgctggggcggcagcagaggagagggtgggtgtgcgaggttgccgccaccccagccccgactcctagctatctctgccccccaaccccgagccaccgccacccccacctagctcccccgcccccgactcctagccaccccgccccccgctcctagccaccccgccccctaaactcccagtgacccccgcttttcccctagggaagtgttccttctggcccagacgcccttcaagagtttctcaggctcttgcttctggaaagaggtgtggtgcagtctgccctggggccagggtgaggccctgctgagctcacccactcccagccctgctgagctagcactgcccccagtacacccgggagcaaagacccgggtcacccgcagatggcggcagcacccacagccggccagggtccgtgctcacctcttctcaggggccttcacggccacagacagcgaggccatggcagtaacagtctcggcttcctcgttctcacacttctgggcctcgaccagggagtagccggcggtggaggcgagcctctgcagcgagcgccagtactggcctgcggaaggggcgggtggctgctcagaccagggaccccagccctgtgcttgggcccacggggctccggcagcacccatcgctggcgacttaaaagcatcgcactctccagagacagaagccacgaggcggcctggttagaaactcacagagggtggcagtctggaaaagcttcctcgtgaccaggagaactgggcccttcaggggcaggacacctgggtgggggtgggctccccggagggtcccttcctcagggtggggcggctgggacgagcactccctgactccctgctggagtcccgagatgatgggggtgggtgcaggcagcctcctggtgtctcctgggcctcagggctcctcattcaggaggccaggagctcagtgcacagcagggagaccctgggtcccgcccatgcacacggacacttgcgactgggccaccctgcagacccaggatgaaggcggggcagaagtccgtgtgcagcccctgggctcctgggcctggttgctcgcggggcagggctggtccttgggccaagggtgccctgaactgatggactggggtttgccggtccacgggcagaggccagacccgaggacacaggcttccatgcgggtcccagcctgtcagcgggaaacctggagaagggacctcacacaccccctggaccgcagctcttctgccccacaaagcagagctggtgacttggctgtggcaggttgtcgggacgttaagcggggtgagaggagagtcaccagctcatcgcattcaccctgaaagccaggtctcaacaggcgggcctggggatgctgctggcagtgagagagaagcgggggttggggggtgggggggttgtggtaggtggggtgggagaagggttgtggagtcgggcccctcccctggggggggtctccttgctgagccctgggccaggccacttactgtggatttcaatgaccttctccatcgaccgcacggcgttggcattgggtctctgctgtaagaccttttctgggagaggatcgagctggggacgaaagaagaatacatggtgaattcgaggccgtcagtagactccctgtgagtgttcggatgggatgtccggatcacagactccccgtgagtgttcggatgggatgtccggatcagtgtcttcctcatgtgcacgtgctaacagagaagacagcttgagaaagccagaggtggttgtggcatgacataaatgttttcacagaagtagacttattttccttaaggtgtttccactaggaggctctcgggtacgtccgtgggtgcccgtgtgggcaggacactagctggtgcccagaggcagctggcgcagaggggcagcagcgtgggctccaccgctggaggcacggcacagcgtcaggggaagggatgatggatgactttctggaaacatccgtttcatcgcacttgtaaacaagggttttatagacagggcttgaatagccccactttgggcctccctggtggctcagcggtaaagaatccgcctgccaagcggcagacgtgggtttgatccctggatcaggaagatcccctgaaggaggaaatggcaacccagtccaatattcttgcctgggaaatcccatggacagaggggcctggggggctatggtccagggcgtcacaaagagtcagacacaactgagcgacaagcacatctgcccttcggagttttcttccaatgatcaggtagaaaaggtagacagaggtgtgagcatctctgctctgagctctccggaagtccctgcagcaggcggagtggggaggtgcacacggcccgcctgcctggcggccacaaggcgcgccgggtgtctgccacagagccgcccagcacgcggctaaaccggtcacaacgtgcttgctcctcacaagcgcactgtagccagcgtcctccgtgcttatctgctgtacaggcagcccctgctccggggcccggccgaattccgtcgcccctgactgacggctcgcggccctcactctgcttctttccttactttcactgacttggcatcgttgttcctgcctcctcgagttcctgttgatcggggctttcctgcactgacgcccttgccttgctcaacagacagctgcctgggctgtcgtccttctgcctgaagctcctacagagttttcttcagagaaggcctcatgggtcaagctttcccaggttttttctctcttcccacccaccccagccccgtggccacagtcccgctgggcctgcggctctgggctggtgggctcttcctctcgacatggcagaccttgccccgctgtcttctgcttccttcactgtgaagcggttggtgtccggctcacactgctcctcgtgggttgcctgtctgctctctctggctactttcacagtttcctgtttgccttcgtggtcctgcagtcgctcagatgagcttggatgcaagccttttttttaaactctctgggttgggcccccttgccttccagagctgagaatggtgcctccatcagtcatggaaggtcctgggccgctggcactttcagtcatccaccccgcattctggtggggacgctgaacagacacacaagcccccttctaccccttgtctctgggctgtgctcagcctcattccttcagttgttgcttccaggttgtgggattccctggtggctcagtggtgaagaatcctcctgccaaggcaggagatgggggtttgatttctgggtggggaaaatcccatggagaaggaaatgacaacccactccagtattcttgcttggagagtcccatggatagtgaagcctgacaggctacggtccacggggtggcacagagtcagacacaactgagcacacacaccccttccaggttatcagtcgtctctccagctgatctcaccgagtttctattttctgctaatatgttttcatttttagaagttccatttggctctctttaaactatcccatttcagtttcagcgatttctggttcatcattcattagtatcttacttttaatatgttaaacatgattactttatcgtttaaaactgaaatgaaaaattaagttctggtagggctggtgacgaaaatcagaggaggcacagataaacatgttaggataagaagcacgactacaggaacagtagagatgaaagacagtacaagaatgctggtaacttcaatcaataatttggaaaaattggccgagatagaaaaaattcctggtaaaatgtaatcttccaaaatttactcaagaagggataaaaaataaatgacaaaatcagtcacttaaaaatttcacccaaaggagacccacggcccaggaaagccctttcagtcaaggaacagattattctgaccctacattcacttttacagagaagagggtactcccagctgtccatcggtctgtctatccctccaaccatccatcatccatccatccatccatatccaaccactcatccatgcaaccaaccaccaatccatccatccacccatctatccatccattcaaccatctactatctatccatttatccatccgtgcacccatccaagcatccaccattcatccacttatccaactatcccaccactcatccattcaaccatccaccaatccacctatctatccatctacccatccacatacacatccatccatctaaccatccaccatctatccatttatccatccatacacccatccagccatccaccacccacccatccatccatcaatccatccatctgtccaaccatccaccaatccatctgtctatccatccacctacccatccaaccatctaccatccatccaaccatccacccatttatccatccacccacccacccacccatctatgcatccatccaccaaatcatccacccatctgtccatccatccatctaccaatccatctattcatccacccacccaaccatccatccaaccatccaccatccatctacccattcactagttcatctatccatccatccaccagtccatctgtctatccatccacccacccatccaatcacccaccatctatccatctatccttccctccatctgcccacccatccatccaccatccatccatccagccatccaaccacccaccatcatccacttatccatccatccacccacccatccatcaatctatccacctatccaccaaaccatccatccatccaccagttcatctatccatccacccacccatccaaccaattctccccccaaaattgattaaaaaaacatggtctaatagaaaaatgggcaaaaaactggaaaagaaaggttgagtggccaagagacccgtgaaaaggtactcagcctctgaggaacgaggaagtgacccccctgctgaactgggttgtgttgtcctgcagactgatagggtcaaatgtgaaatgccatgttgctgaggttggtcctccactactgagggcctgagggacaaacactcagatgccacctcgtagacgtgggaccaccccctccctccactgggatctgcctcagggatgcagctgccctctggccatggctgaccgcacagggtgggaccctgatgtaattcccaacctgggccaacccggtgagtcctgggccagagagcagatacagatggggagcccctccgggaacacctgcaggtccccttgaaaacggggtgtccccgtgaagacaggaatgtccttaagcaccttcgtcagtgggccaccaagggcagagcccaggtcccctgtgtgtatgaagctggagcagaaaacatgcctttcaggtttggggtcctcactgtggcataaacagctgtggccttattgctgcagtacaactctgatagtttgctaggattttatcccttttaagaaaaaagcagtctttagaaaataactcattccataaaatgcctatcacttgaaggcagagaggtgtgtcagagcatggtgccaggaattttctaaaacgcaaccccggtcctgctgctcccagtcctggggggacccccacgtctaacctccccagggggccctgggcgtggctgggggctgaccctccagggcgctacatggctctcctccagcaccctctgcccgggtcacgtccggtgagcaccctggcgcccacattgccatctgcgccgcccccccccatttccgtggcggctccccatctccagccgctctgggcgtcagtctgcccctagcatgtgtctagcctccactttacacacaaggactgggcagtggggggaggctctagctcttaaaatacataaatctctcattacttggggtcttatttttcatttaatagacatcactgagcagcccagggagaaccaaccactatccatcctgcaaacttcggaaacatcagggaacaagagagacagacctccgcccggcctcacagagcagggccccacgtccgcgggaccggcctgggtgaggggtgacgttcacgcaggagccaggcggtgggccgcagggaaagcaggggaggggggtcaggctgtgctgagctggggagggactgggggccagtgcaactgggagcagggagtcgggcttggcagagggatctgaggcatacggaggcgtacggtggccccaggaggagagcaaacgggggccaccagcctgctcttggcctggccgtgcgagctcggagagctgggctgtgtgccttcacttgcccgcctgtgtctggaaggaaccaagctggagaggctttgaggacctccctggtggctcagacggtaaagcgtctgcccgcaatgcaggagactggggctcaatgcctgggtcaggaagatcccctggagaaggaaacggcaacccactccagtattcttgcctggagaatcccatggacggaggagcctggtgggctatggtccatggcgtcacaaagtgtcagacacgcctgagcgacttcactttcacttggaagagaacagagggccggctgtgggtgacaccgagtccgagtgatagatgggagcccctggccgcaccggggcacgttcaccttgcgtgtattccacgtcacaactgaatcagaaaggaggctcgtcctaagctcggcctttaacaagccagcctcggggaaagtgcgcaagaaaacccttgtgcagagcacctggttgtgggtgtgggtgtggctttctactctgcagtttacaagagctcacaccacaccctgagcgagcagaaaccagagaggttacagcaccaaagacgacggtccttacggaatcttggccgaacccaggtcacagtgtgagttttccagaaaacagaactgcactttagtgggcacctctgggcctgccgggaacacgagagatgacggagcccaggcccccagcccatcctcaggggctcacgccccgtcccactgtccgggagccgccccgccatccgcccagcctgtgacggtcctgaccctcatggctgcgcccgggttcagatgcccggccaccccgacaggtgccccagcccctgcgctcttcccaaggagacagacgacgtcccccaggtctctctggcccaccctaccccctgcccaaaggctggctctgcgatcccctctccccatgggcagagggccctgtaggactcagagccatgggggcctgggggccgccccagcctgctctcctgcgtcttcccttctctcttggcctctccaggaccacttccagagatgggtttctggtcggcctcctctcccgagtcctccgccctcaggcccggccccagcctccctgctggctcccctggggaggggccgggggccacctgcggtcacctctgactgcggttcccacctgctggcagagctcctccaggggccttagggaagcatgctcccgccagggccggggctgagcccttctgggccatcccctcctcggggtccttgaggggctgggctgtgggtggggtcccctccccctcaggagggcctgcacatccgtctgtctgctcaggctctgtggcctcagcgtgtggactgcatctggcgacggggccggactcagcgattatccggggccggccacatggcgtttcctgagcctcctggtgatggcacagaggcttggagaacgtggctggttttcaacagtttttaaacactagcaaaaatgaaccacatggcaccaaaaaaccacaactcctttggacaaaggttaaaagactgaggctccattgataggactgcggaaggcatgcacccgggatggcgggacactcccggggcccccgaggtgggttccggtaaccccctcgggctcaggtccccattcccccagagcaggaggcccaggagctccggggcgggtcccctcttgcccgcagggggtgcagggccacttctccaggggagggttgggagctgatgggcccgctggaggcacagctcggacacgcggcccacctccccgacccaacgcaagccgtgtcccgaaacacgactaggggacagcctgctccatcctcacggcctgcgtgctgccactttggtgaggtgagcacaggtgaactccagctggcgggctggaagctgatagcgggcttggtcaaccctgtatctcctgcgtccacccgccgcttctaaccccccggggccgcctcactctgtgccctggcgaggcagcacagcgggaccagggagggtcactaccacggctgcgggccacttgatcccccaccacctcctgcgcggggtcttggacgggctcaatgagatggtgccatgggacccccagaagccacacagctaaacagaaaacggcccccaaaggagcctccccttgggggcgacctgtgacaggggaagtgactccccacctgcccggggccctgccctgggctgcagctgcttggcacgccacccacccagctcccgtaagtgacatctcactgtcaccatccccaagggctgcagatggcgtgaagctgaaactagccaatacgacggcttcatgtttaatagtcagttcacacagcttcagttcagtagtcagtatgatggctcttggggcggggcagccctccaggcccagccccgtgagcgcccctctgctgacccccacgggcaggcaacaccggccgcgcacagtcggcttccgcagccctggagcaagctgtccccgcgcccggcatcagcctcatcaaaggccgaggggtgaggctccctccaactttctggcattaaaaagatttttaagagacctcgataaaactagggcttcctgctttttgatgtgtttcaccaaaggaacactttgtccgaaaagcacaagcagctgagctgaaagccgagttctctgccgctgttttaaaatagctggctctcagaatcaaaagccctcaagatggcttgaatatataaatcagctgccttctcctagtaaaaggggtggggagatcacgttatgggaagagaggagaggtggagagctctgcacactttggaaagcaaaagcaggtgggagtttgccagagaacattcacacgtgttgctaacaagctgatccgacaggggagactccagcaggcccctggacccaggtgtgacttaggttacaatggacaccatccaggacatgcagaggttgacaggagaaagcaaagccctccccggtgcctgcccacccaagcttaccacctccacccctgttgccagccagtggcctgtcccagcagacagccaggaagcacgcacccgggccaaggagcacgcacccaattcagggagcatgagcctgggccatggagcacgtgcccgggccagggagcatgtccctgaaccagggagcacaagcccaggtcgtggagcacaagcccaggtcgtggagcacaagcctgggccgtggagcacaagtccgggcccaagtctgggccaaggagcacaagcctgggccgtggagcacaagcctgggccgtggagcacaagtccgggcccaagtctgggccaaggagcacaagcctgggccgtggagcacaagcctgggccgtggagcacaagtctgggccacggagcaccgcaggcaggccctacagggagccgccctgcgattctgcctctttccctccctgccaggagtctcagatcccccctgtgagccccttggcccggccgttgggagctgccactgcaggaaggacacacctgtccagaggcagggctcaggcaccctcacggggaaccagataaccctgaccctactgagagagggtctgcacactctgcaaatgtggagaagccccattttgtctgacgggccctggggaggggagcagcctccaggcatctctgggtgggcctgcacctgcctaaggcccccacaagaccctctgtgtctggtgagtgtggaccctgggccagctggcgacctgggccacttggccgtgctgcccaaacaccagcggctctttccttggcccctcccggcaatgccgtgggaaaagcagccagagaaagctgtatggcaggcgtgggaaccacccacgcttccctgatggggtcaggaggctgggatgtggcctcgtatccaaggccgtggatgcatttaaagcttcgggaagagcacggttccaaaatctgaggtggaagctacagagtgggtttctgtcatgaacttcagattctcagaactgacccaggcagtatccccacccccatcctcccctgccagtggccaggtagttttgtccaccaggagtgccagtgggcgtgagcgtcctggcctgatggcattttagcctggaaagctccctcccagcgggtctccctccatggaaccctgcaaagttccctctgagccccgctgtcaggctgggctcctgaacccagtcctgggcatcgcccgagggtcagagcagcaggagagccacagcccacgctccagcccccgagatggcatggtgacccctccctcaggacctgcttcaggacgtcccagagaaccgaccacctgtgaggaggaaaccaggcaaaggcgtcccgtgcaagccctgcatcgaggcaggtgcctttaaaagacaaatgctgagctgtccgctcaggggacatggcttctaactgtctctttgcccacccacttctggccacaatcagacagtcctgccgggcgggcaagcctcctctcagatgcgagtggcagatgtgcaggctgcgggacagtggggcagggcgggccctcctacctcattccccagcagagcagagacgcaggcttccgaggcgtcgcagatggccgtgagatcgtggcccccctccagcgccaggacaacccggccgccggccaggcccattagctgcttcgtcaggtacccgaaacctgcgggggacacgggagaggcaagtggcgggtgaggccaggccgcggtgccggcgcctggcagcagaccaaagcggccaggggcgcaccacaccgccttaccgaggccccaaggctggcattccgagtgagacacctaatggaagtcaggttggcttgtgataaattcactggagggtttcggcttgggattctttttgatctccgtgggagtaggaattacgggttcggggctttgattttataatgctgcaaatcatctcgttcgggggcggggaggagccctgggggagcccccatctcgcctgtggaaccacagaagccaggaggcaggagggtggcgggcagcgcagctgccggggcctggccacgtccgtcccagagcccagggtgttcccgtcggccgagtgccgggcacaggtgtggcaacaagctcgcacgcgtgtcaccgccagggcccctgcgccctgtgtcactgccgtgtcaccgctgcacccccgccagggcccctgcgccctgtgtcactgccgtgtcaccgctgcacccctccagggccctcccgcgtccccatctggcttcctcagcagccacgggccctgcgctgcagcacaacaccctccccacggggaacggggatgcccctcctcggggagccaggccgcctgaccccatccgtccgcagaggctggcgctcggcagagcgggcccgaggctggactctgcccctgggcagctgtgggagccagcgaggccctgggggcccccagcctcggtctcgtctccgacggcaacagtgatgctggcttggaggggactgtgagggccccaggaagcactcaggcatggcccccacgctgggcgtggaggccgctggtgccctgtctgcccgggactcagcctctcggcccctggccgggcaggtgggctctgcgaggctgtgctctgtggctgggcttcttcttcactgcaccatgctctccccacatgggggcgggggacaggctcccctgacaagccttccctgtccccctggaaccccaggctcccagacactgcaacccccaggtcgctggtcagggtgggggcgtccaggcctctctgtggcgggcgctggggtggggtgggggctgctgtcacctgcgtgagttgctgagacagagaggacacacaaatctctcctcccctgactggagtgagcctgctctcgactctgtctgtcttcacagcgtttagggccagctcccccacaggccccatgggggatgacagcccccaggaggagggggacctggccccagcggacagcggcagcgggcaggccccaggcttgctggcctcctggctacatgcctgccgcaggccttgtgctctctggggagcgggtgtcgtggtttcagtaagatgtctttggggtttggggtggacactccttccacagccaccagaggggaagcctggtgtgcacaccgcacatctgatatccggccacccacaaacctgacttacatttggcggagaggttgtagcctccgaggggcgtggggtggccctccacagcgtcgaagcccgaggacaccagcaccacatccggggcgaactcactggcaatcggcatgaccacagtcctgcacggggcagagggggagacgccgcgtcagcccagggcggccaccgtcgctggctgccggggcttccggggcaccgcccagcactggggacccggggccgggtgcctgagctggggtgtcccagagcccctgcgctgggcttccacgaccccagcctgaggccatgccgtcagctgtgatggaccaaatgacctgctgccggggtgcaggagggacgtgtaaggttaattagaaagaaattcaacacttaggatccctaaagggaaaactgatgctccagtttaagagaaccaactggttagaagtataaacagacactgaggaggtcaggggctaagttacatttgggaaacagggcaagaaaagttgggggaagctcctgttaacacaactgcctcaggagctcgcagcctgagtgtacggctcagcctggaaatctcgcttcctgctgagactgggaagactcccatccagtccagcacctgacctggagccagcctcatgggcctgaaaaccaccctgactttctgtcttcccctgcccggctcctcacctctgagacacacctcgcccccaccgggtcttcagaagattgcatgagggggctcagtgtgctaggcatgaccaatggtccccgcccctcacgggatgggccccagagggcaccatgggcacgggccgggccccagaaagcacatgggcacggggtgggccccaaggagcaccatggccacgggccgggccacagggagcaccgtggccacagggcaccccctagaatcccacaggctctcatcaggatgacatgaaatcaccatttacgacagcaaagtcagctctggaagatgacaactttggtcaaagaaacagaatccgttcagttcaatttagtcagttactcagtcgtgtccgactctttgagaccccatggactgcagcacgccaggcctccctgtccgtcaccaactcccggagtttacctaaacccacgtccataagaaacagaatgctcagcattaaatacttctccatctaggaactatcctgggtcgcagtcctgttgagaggtccctctgatttcaggtgggggcggccaagaaccctggagagccacacacaggtgaagacctggccctgctctgcaggacccttggtgaggagtcaggaggcccggccggactcccgcgaccacgcacggcccggggggcttcccaagggatgtccacctgcgacgggtcaggtgctgggagcgtctaccaccaagactcaccgacttcaccctggccctttgtccacccaggaaacccccttctggaatcagggagtcacaggctaggtgggcctttcagcagctcgcagcttctattctttcctctgaggctgtgcccagttcagtttactcctgaacagcctctgcagagctgacggaagtgctctcaaggactcaggctctgggcctcgggggccacccctcagagcccagcaacactgcgtgtggatcagaccaggggctgagagcattccctccgagggccagggagcagacacttccatctttgggccactcaacttaaaaaacacaagttgggacttggtccctgggctgccatccaccagccctgccccagccttctgccattccgactctgctaaagttgctccacctgtgacgccagccccagctccgaatgcttctcggcgccagtgggactagagctcacaggaactggagacgcaacgtagagagagcacagcctctttttctggctgcaccatgcggcatgtgggatcttagttccccgacgaggggtcagaccggtgtcccctgcactggaagcgcagagccttaactgctggacgccagggaagtctgtaagcccggtcttctaaacacaacacaggcatcagagcaggccctggggcttgtgtggaaattcctggtccaggctggtgggaggggggccacctcagaatccaggaagagctgtctgctctccctccacgcccggcagctgtctgtcctcacaaaggcacaggccacccttctccacgttgagcacccggcgggcccctctgcacgagccctcatcattccagcgaggctggttttcaattatttttaatgaagttcttgtcacataaactttgtctttgggcaggagaccggcttcagccgcaatcttggtagagattttaaagccggcacagtgtttcagtgaaaaccacagacgtttcaagcagacgctggctcattcagagagctccagcagacgttttgaagcaagtgcatgtgggcgctctgctgctctgctttgaagtatcgcggagagatttcatttctaatccccccacaaaattaaaaaaaaacagccctgtgaaaatcatcactaaaggaggtgagtaccgagagggtccctggtgtctgtgcttcgtgtgtggctttgctccaaagccaatcataacaagttgtaaagcacggctggtcccacgtgttggtgtgtgggtgagtggtgcgtgcgtgcgtgcgtgcagggtccggggaggggggttggcacaccggccaggcgggagtctgcgcacctgggagggtggatatgcgcgtgcacaccctccttccctcttcctggctgggacagttgacactgtaatcccgaatgcttgctccagtaagaaaatctgacatggcgctgttggcccggcgtgtgcggagtgggtgtgcagcacacatttttagtgtgccctaagccctgagaaatgtcgtctccccttgactcagcttccttgtgggtaggagagggctggatgcgtcactactgactgtctgccagcctgccttctggacctcccagcatcaccctgctggggaccctggtgccagaagcaagctgccagcccatgaccagttaacaggtgctgcaaagaaactgggaaactgcctgacattttatttctaggatgaagttttaatgagcaatttagtctgaaaataacaagatctaaatatccgttgaaggccttccctcaaaccttagagtccaagctctaaggtgagtgggtgggtctaggagtccttggcgaccttcggggggacaaccaaggacagtgttgagggccaggagcctcccagggcagcagactaccaatagtccactttcagggaggagaccctgagagaggaggaggccaggtgcagctctggacgtgggaaagctggggggagatggcaacagggacgagcggcggaggtcctggggcctccgcaccccagggagtgggatgcaaacgtgcaaaccacccgcgtagctgagctcctggcccgtgacgcctgggacccagcccggcgcctccgccctggacacacgctctgcccctccatcctttacccctttacccctccatcctttgttcgctggtcagtccacacctgcagccaggtttccacggggaaaagccaggctgggcgccagggctcggcaggccggacaacagggtggatgttgctgacgggcttgtgcctgctcgggccagcctggtggctccacgaaggcggcagtgcccggggatgctacagggtccctacagctcccagaatcacgtcttatcagctgcactgtccctcgcacagccagactctgctgtgccaacatgccaatcccaacccacagtgaaatctaaatgcatgagctgattcaacagctagctccaacttctaaaaaagaaatgacttctcgatacaccactcaactggggcctgcacaaatccaccagactggtggtcaatgccagctaggggcagacgacctggtggccagtgggctgcggcgctgtgttcaggggctgtgcccactggttccagggccttggttggaaccacggttccggctgctacgctgcccctggctcccttctgaccctctgaatgccctggaagcactgtccacacaagctggcccccagagccttcgccccacaggcttccttgttcacgctcacgcccatgtttctgctggctccacagttcatgtctccagccaggagagcgctcactggctggagacgccaggcagaggatgctgacgctgagccctgaatccaggcctggttttataagaggttgctgctaggagcccatcagcacgatttcagtgacggtgttttgatcaccaaaaacttcctttcatttatgctctgcaaggggagcaatgtgccctttgggatctggaattctgtacacctgcccgggggggcctggcctctgagcccctgccctgggggtcccagcctctgagtccccctgctttgggggcctggcctctgagcccctgctttgggggcccacatcctcttgaaaccccgccccctccaccaggaccgcaggccaggggcccagcacctgctatcaagtacccgagctctgctgagagtcgggatgggaaggaagacagtgatgacgggaatgtggctgcctgggccgggccccccagcagtgatgccgtggccgcggccaggctgaaggccgcccctgctgccgtctccccgcacaggccctgccccgcccaccccccccaccccccaccggagctgcgtccctgaggcttggcctcttcgctctctgctcaccagcctccatctgccaaggtgtggacgtccctcctccccacccctagcaggctcctgggcagcaggcgggcacctcgcccccttctcggccctgcgctctgggccctgcccgtcagcccccaggaagccttgtgcttgaaggctccatgaccggccgtgggtgcgtcccccgccccgacaccaagaggcctccacccaagggcaggacgccacatgccatcggcacaggcccgcctcacccggggccctgccacccacgaggacaggtacaggtgcaacccccacctgtacacgggtgcagcgaccgtgggctacacgctgcatcgctcaactccgaggttttacttctgtcttctgcttctaagaccactgcagtagaaatgtcctgggataaacgctctgctgaggagacctggatgcccctgaagagctacagtggggtccaggtgggtgtgttctcagcccccagggcctgggccctcagggacagtctccccggagcagacacgctactgtgaatgcagccagcgccccggactggaggttcacacgtgtttcagaaggtcaagttttatgtacagtttagctcaacaacaaccaaccagtgtttttaaaaaagaaaaacatgggagaaacaaaagcacctcaaccttcctgcagggcttcaaaggttgggtaaatgaaatgaacctgcccagctgctcagaagagaggccaacctcactcagagagagatgaaggcttgcacttgcaaacaggcagtttcaccagcatctctgataacttataacatggcctttccctcgacacggcgatctgagagcagtcccagttccaccatccctgagcacctttataacatggcctttaaacccacaccaggctctgggagcgtgagcagtcccggctccaccatctccgtgatggtccggctccaccatccctgagcacctttagatcacggcctgtaccccatactgggctctgaaagcaggagcagtcctggctccaccatctccgggatggtctggctccaccatccctgagcacctttgtaacaaggcctttccccccacacagcgctctgagggcagcagcagtcctggcccctgcaccccacactgccaggcagcagggaagtgaggggttaagaaaagcacaccagcatctcctggcccggaggcctctgctgctcagcagacttcaaagctgctggcctggctggtttgaattaaggtccccttttctcccagagtctcaggcccaggagaaagtgccgctgcctctggctttcattaggggcaattttcttatctcttcttcatctcgggcttgatctcctgaaatgcaacgaggcaggcgtgggtctcagcagaaggtgccgcctggaaggcatggggcgagcgtcgtccgggcccccggggagcgggcagaggaggggaaacggcttctgaccctccttccccactccgatcgatgcccagggaaccataaattgttaacttcaaagtgctattttacattaaaatcaataaaagaaaaaaaaccctgaaacaattttccttttcaaagaggccatttgagctttaaaaagttcacttgatagggcatcaccatgtacacacttggcagaagattaaaacgggacatcaacagcaactaggggtgaggggtccgttgtaacgctggcgggcggggagggggcgacccccaggacccgcctcctgcccgctttcccaccccatcagcgtgcccagcaccccgagacagccctggaggccggttcagtcggaacctggtccgaaggaagagggaaccgccatttttatcactttaaacccgactgagcaacttccctttcacttttcactttcatgcattggagaaggaaatggcaaccgactccagtgttcttgcctggagaatcccagggacgagggagcctggtgggctgctgtctatggggtcacacagagtcggacacgactgaagtgacttagcagcagcagtagcaacccgtagtttaaagacagcctccaccagaattcagccatgctgggtcccctgaggcatcagaggtcactgggctgtattcatgcctctcagagccgagtccagacacttttcttccccaggaagcccctgaggagggcctgttctcggggtggggcgtgacaaaatgtaggtggctggagggcatcccggggcgggtggtgatggcctccacagtgaaggccagttttgatttcctgaagctgatatttaattgtgtacgtgagcagttttcagatgtggtgtctgtttggggggagtccttctcccctaagtaagggggaggacaatatcacgattgcattacatcttaccaagaggaagaggaaacgacagcattaagccactgagatcggaggagagagtccgggtggcgacctcgtgggccttctgaggaggcgatggggtcctgtctgaaccggccgctctcactgtctgtacagctcatcacttgagctgctgtttgacggaaaccgagtggcaggagacggggcctcatgccggcggagccacccttggggcctggcctttgcatcaccagacccagacaaccgcccctgaggccagggcacagacgctgcgagaggccgtgtgaaccctaaggccaccccacccagagcccagcccagggcaggcggcagggagggcccccggtcaagctctgacggcctggccttcactaggatcccagctgcaggcgcgacacagctgtgctcacatccacgtgtgcctccacgtacatgctcatgtgcataggcacgcacgtgcacacacacacacacaggtgggtcacacccacacacatagatacgggcacatcacacacccacagatacaggcacatctcacacacatacacagaggtacaggcacatcacacacacacacacacacacacacagacacagatacaggcacatcacacacacacagatacagacacatcacacacacacacacagatacaggcacatcacacacacacacacacagatacaggcacatcacacacacacagatacaggcacatctcacacacacacagagagacacagatacaggtacatctcacacacacacacacagatacaggaacatcacacacaaaaacacacacagagatacaggcacatctcacacacagacacagataaaggcacatcacacacacacacacacagatacaggcacatcacacacacacacacacacacagatatgggcacatcacacacacacatagataaaggcacatctcacacacacagacacagatgcaggcacatcacacacacacacagatacaggcacatctcgcacacacacacagagacacagatacaggcacatctcgcacacacacacacacacacagacatagatacaggcacatcacacacacaaacacacagatacagacacatcacacacacacacacacagatacaggcacatctcacacacacacacacagatacgggcacatcacacacccccacacacacagatacaggcccatctcacacacatacacagagatacaggcacatcacacacccacacacacacacaaacacagatacaggcacatcacacacacaaacacacacagagatacaggcacatctcacacacatacacagatacaggcacatcacacacccacacacagatacaggcacatcacacacacaaacacacacagatacaggcacatcacacacacacacagagatacaggcacatctcacacacacacacacagatacaggcacatcacacacagagacacacagatacaggcacatcacacatacacacacagatacaggcacctctcacacacacacagatacacgcatatcacatacacacacacacagatacacgcacatcacacacacacacagatacaggcacatctcacacacacacagatacacgcatatcacatacacacacacagatacacgcacatcacacacacacacagatacaggcacatctcacacacacacacagatacacgcatatcacatacacacacacagatacacgcacatcacacacacagatacaggcacatcacacacacacacacagatacaggcacatctcacacacacacagatacacgcatatcacatacacacacacgtgcccgcatgcaggaaccagagcacgcactcaagaggaagggaggagagtcacttggaaagttgatgggctccaaagcctggtgcagaggctgtgtctcaaacaaagatggaaggtctgttgggctttgctactgatcagaactctcctccttcccaggggccctggacgcgcacttgccaggggctgccccccatcccctgtcccccgccccccagtcattgctctgactgcaacaggaggaggaaaccagtgctaccagccctaggaatcccttcaatgtggcccagatcgaagcagaaatcacggctcaatgacaaaagcaaagacggttttacgagtcgccttgtacccgacttgcccagcccagcctaacacaacagaaccgaagtgactaggggaggccctcccgatttttaagtcagcagaggagggatgttcacttctgtttcccatcatctcacagaaggttttttgagagaattaggatatcaggagccttttcagaccgcagcacccgattctcattaacctcatgctttctgacaccttcccccagcctccctcactttcttactatcaagaccccagatagagtcctggtttccacatgacgcacaagacaggaaccctgcagacggaaggtgagaaacagtcttggggatgccacctctggcctgaagagcagactgtgagaagcctcggggttcgtcccccaaaacgcagagacagcaagaccagtccccgcggtgccagcacacagcggtgcccggggacggagcgggggtgctcacaagggaaggtgaaggtcagaggagaacggtgaagcccgcaggagctgggcccccacgaggggttcccaactggtccctaagtgccccacggggcagaagccaggaccctcacctgaaggctgccaggtactctgcatctcccatgggggggtccaggccgccggtgaaagccatgttgacgttgaagcccacgccagcgcccgtgcccacctgcacagaggagacatgcatgccatgacccgacctgggcagccctcatggtgtgcccctcgcccacccacccgcccccaacacgctgcctttcaggatggggagttttcagaggcagaaaccctattcccctgcacgtgcagagtgtgggggctgcgtgccctgcctgagggaggggccacaccatgaagggccgcgaggaccgctgcgagctggcagtctgccccgacgtcccttctaggacgagaccccgaggtgggcgggccggtctccttggacgggattccccactgtcgggcttctccactcagagcagggaccttcgctggagtctcgggggtcactcgggagctcaccatgggcactcgactggcgagagggccgctgccctggacacacgtggtgactgtgcagcagcctctcccaagggcgagggtgcctgtgctcaccggcccaagccctcggcccgctcaggctagaaccagcgttcccaggatgtcgtctgcacacggaccagtcgtggcccgtgggggcacacgtgagggatgtgggctgacggccgcccccagtcacgccgggccccctctgctcacgggctcacctcgtcgggtgcgccgctgcctgggaagaagttgccgtcgtcgtagcggtgcagggagatgtagagcacgcgggggtcgccgtagaaggcctgctgggtcccattcccgtggtgcacatcctgtggggcggggggtgctcagcgccagcggcctcccgtgaggccagcgcctcccgccagcggggacgagccccccggctcggggccctcagggcacagcctgtggcaggtctgcagggtgtctcgctgccccgggggctgccgtttccaggcagggtcatttgatccgtgtcttgccccaaccccgggggtcaggggctggtggtggggggagcttgccagcactggcactgctggagtaaacgcccttcctgccagcctgtggctcccacggctgctcacttgggagggcgggctcagggccagctccgccaggggctgagagctgggggcagacccagaacaccaggggtgctagaccctgagtggggtgacaagccacatgagtgggggtggctggtggccggtgcgtgagctgtgggctacagaccagccgcggttttcagcccaggaactgctgagaatctgcacacgaatgctatctgagctcactggagaaaatgcaggaggacagctgggagcgggggaccagctgggttccaccgaggcctgagggtgagggtgggggaggtgccacccgccgccatctgcggccacagcagagcctcctgcacagccctggatggcagccggcgagtgtccgccttctccaggggcttcatgcccccagcatctctgactgctccccatggggggctgacgaggggctccctgggctgaacagagcaggcactgggcgtgtgaagaccagggtcggcagccgatgccctgcagccccggcaccaaggacctctcaccagcgcctgctgcccggagcttggggtgtccctggctgtgttctggttttacttttcccaaacccaggaggaactctgcagcataaaggataatcccgcctgaggtacctgatttttttttaactaaaaaaattatgaaatggatcataaaatccaaagggaattttctcccctccccttgccatctatggcttgaaaaacaataataaagtgaacaccttgagtacccacctcctacttctggaattcagttattctacagcgtttttcatagactgtaccctttcaggcagggcactgtcagaagtggcccgtcatgtgggaaaatgggacagggggttaaattggtaaaaactgggtcacccggcagaagcaggagtgacagggaggcaggcccccgtcagtgccaagggcccacgagccccacctgccccccaccctcctacaaggtttggcaagaccaccctctagctgctgccctcaaccaccagcctgtctccagacacttcagaaccatggtcactgataggacgggctggtaggagctggcacactcctcaggtttggggttttactttctgcatctttgagggagtttccacaaagtgcaggtccgcaaatccagtcgtcagcggaggtgggaaagcctgcctctcctctgtctgctggaggcggggtggggtagggacgagctggcagtgccccacaccccctcaactcacccagtccaccacgagggtcttgctcacgctcagcctttgctggagaagcttggcagcgatggccacggagttgaagtagcagaaccccctgcaggggagaatcaggagaaacggagaaaaaacgtgggctctgattagtttgtacacagcttgcacaagaacattcgagaatcccgagggtctaagaagtctggtgaaccacggcttctgatgacgcgatctggacaccttaactgacgctgatcatggaggcgcgcgcgcacatacacacacacacacacacggaccctgcgcacagcctgtccatgctctcagggtggcagagtccatttcacttcgtgtcccgggacacctgctgagacctgcactgaccagcctcccaagaggcacacaggcccacggaacacagaagttactattctacttgctccccgcttatctttccgtgttctgggatgtatacaatgattctagagaggcttcgagaggatgggaaaaacaagccaagaaagtgagtcgagtaaaaatgaaaatctcctaaacctgaactgccacagaagctgagaagcctgggtgggcttgttttgggggtgtaggctgtctgtctggaaggggtaccaagcactcgtagcctctcctgccttgctggcctctgggacccccaagagagccttcagggacaagactcctccaggctccatccaggtccccctgagcccactctctaaaacatgtaacaagccagactcagattagaaaggtgacctcagagcagatactcagtcggtcagcacccgcttctgggtcacgtggactgtcctggaccagggagggatgcacgcgggtgacgacagctcctccacagcaagggcccttcctgcagccaggtcccgacgcccccactgggctcaaggtggctccctgcctgcgtgcttcctgcttctccccgcggctctgtctgcatgtgtgtgcctcaccagctgacaggccggcgctcagccttccaggctccgcctgtcgcctcgtcctgatgaccccaaccctgagtcttctgtctcaggccccggtagaagccccatatggcactcactgagggtttcctgtgtccactttgggcacaacttgtggggtcaagtcctgtgactcctgcagggggcttctcctggacaggggtggatcctgagtccacatgccaccccccgccacctcagccagctccacaacccaaaacacaggctggacagctgaccactgtggttgtggcctggtgacctgagcctcatgataccagagcatgagcaggtcggctggaaggccacatgtgagcaggctcaagaacaaggacgtgccccctgaactcctcctggggcagctgacgttccctttcctgggctagacaaggaggtggcacctctggactcacttctgcaccctcagcctcccctctgtgccccctgccacccgaccccgcatctttccagagtcatggccaactccagctgcacatcctgctggcccggcacatgggaggggtgtgagacagtcgtgtcccctgcccgtgagcgaccacgtgtccacttacatgggcgtgctctcctctgcgtggtgtcctggagggcggaccacagcaaagccgttctaggcacgacaccagcggggagagacggacagaagattggtttcaggtcagtgagaaaaagatcacaggctgcccttgagcacaggcacagtctgcatggtttccagccgcccctgggcgcagacgtgggcaggacccagggctccctgtgagtggttcggagacacccaggtcccttctgtgagaggcctgttgtcatcacagatcactgagacaaaaggtcagctcactcctgactttccatccataacagtcttctggccaggctgtgggctgctgagcgggggagtctgggaaggaggggaaggggcgcctgtggccctgttctgattataaccatcaggaagtaactggatgggaatgctggagcaaatgaatctgatggggcttggctgcaccttggttgggttgtaatgtcagctttcctgctgtctctgtggctcagctccctgcggaatgggcagtgcaaaaaaaggaccactatcgcctgtgagcaaagtcgacaggctggagaagagctgcaggctgccccctccaggccccgaaatcatttaggctttaaaaggaccatctgcaaaccatcctgcagccactgtaataaagacggtttagaccagcacgcccagtctcgccagcccaggaagctgtgtggtcaaggtctgcaacggaggccccagggccacggaccacgctggccaggcatgggaagtgtgcccagcctgctgcagagactgggctgggggtgcacttggtgggagaccccctcagcaccgcccaaccttctccctgtccctggacaggacctcacaccccgggcctctccagtaaccccacggctctgtgcccgcccccgtgtagctgagagccgaccagcagcaggtgcggtggtggggggagcacacaggttcccagtggaacggcagctctgtgccagcgccccaaggaagcagtgagacttatcaacgtcgttaaacctggacgtctctttaacgcctgtgcagagagacggggtgtgtaaccagcccagcggggctgtcatcttggggagaaagagactgtggtcagcgtgggatctgagcttcctggtgaaaatgagagctttggaaaaccagctcttgcctgtgtggaggagaccctcctgacgagacgggaggtgacaggcacggttcccagggtgtgggctgtgaacactgcctagtaagaggcgactgaagggtctggggccctccgtgacccctcatctccagacaaccgagcaccgtgcaaagtcaggataaacgacgcacttggcgtgcggggcccctcataaagcaggaggacagaggccgctggtgtgtttcagggtctgcactgcaacacgtcttcaggacagcgcccctcgctgaactggggtgtagggtcagagacgcagacctgtagtcccctgaggagcccctcccctcgccctgcactaggccaggctgcactgccatcgtgtgcttcaaccaaggctgcgtgtcgccagccacggatgcagaagcgggtgtgacgatcccggctgagccacaaaagccagatgcaccattatttttaaattaacaaatatttacaaagcttcctttttcaatctctgatgactagtcagatgtggatgacacaactcctacagacaaaagctctcctggtctttcagccactgtgagagggtggggctctaagagcgacctcgctgagaactgctgtgtttgtgtgtattctcacaagggcagggtcccctgcgggtcaacagcggggacagacctgggcaccccgcccccctcgcagccgcccggtgccctgcagaagcggggagcagaggcggccggctgccccctccccgggcaccctccccccaaccccaagtccctgctgcgggtcctcactgaccttcagctcccccgtggccaccttgaagaccagctccaccacacagcccacggccaggcgggcagcccccgacgagtgcacctcgttccatatggtatcactgtccacctgtggagagagtgggcctgcggtgagcccagtgccccgagggccacaccgcccccgccctgccggggccctgtgctctgcctctgaaactggagggtctcgtctctccctgactaattacagaacacggctcacattccagcttactttttttttttttttgaagacacgccaaaaaatactgaacaggaaaagaacggtaaatgcacccaaaatagcgcacctgcgttctcactgctttctgaggtgtcatttcttttctcagtggctccaagttactccaagctaagagtcgtgatgtcaaggttacctagctcccccaacctctttttttaaactgcaactgcagctgagttacactcacagtcagcaaaagcaaatgttaagaagggttagaattagctgtttgctgttcagtcgtgttcgactcttatggactgcagcacgccaggctcctctgtccatgggatttcccagggaagaagagcacgttgccatttccttctccagggaatcttcccaacccggggatcgaacctgtatctcctgctttgctggtggttcaaatggtaaagaaattcgtctgcaatgtgggaggctgggctttgatccctgggctgggaagatccccaacccggtctctgggaaggccggctctcatgtcgattttattgaactgattcttgagctgaaataactggtccccaatattctagttgagagactactgcaatgaataacagcacaccattatttagaacagaagcctgtctttgaacgttgaatattaatgccgcggagaccggactaagtgcagagcgttcttctgacatttggaagctatttaaagaacatagcggtttggtcattgaaaagaagaacccgcacggaataacgctcctcaggaaatagttcgaaccgctcgtaaatgtattttaaatcatcttgctttgaagatgaagcctcaagacttcactgaaagaaacccatccacctcacgtaatgatcagggcctgggcgccgaccctagtgggggcggggtgccagaccctcacctgcagctcagcccctgtgtctgggccctgagcgttcagggcttggaaggggttgccgtgggcagcaggttctcacgggccctgcagactccgctccaggtggacaggcctgtcactcaggcttcccagagccctctctaggaagggcatgggagtcccaggcgtgtgttccagtccgtaagagtaccatcctcgatactcaggggtggtttgggcaaaaaaaccactcagattctttctcctccaaatgcagtaacttgggcttttggctaagtaaccagagccagagggggaaatggaccgaccctccgcgttcagtgaagggtctttgtgctctgctcttgtctcaagggtccagaagctcccatacataacattgtgtccagggtaagggacagacccccagccccactgcaagaccccaggctgccactgccgcccgagaaactgaaggtgatctgcactgcctcggggcctccagctgctggccagcagctccccgtggacccagtgggatggagggcttggagccctgagttccagaagaacgaggctccagggagggcgctgggagggcgacaccgcagaggcggccccactcagggtgaccgccacacgcgggagtgatggaggcgggggaaacagggcccaccgcccaattccttcacagttccccacagtgaaggtggacgggaggacagctggggagacctcacacggaggtttcaaacggacacttggggtggcccttctgggtgggctgcaggcccccagggcctgtcaggggctgccccctttagccagcgaagggctggaagggaaatgcaaaaatcgggaggagagcaaagcagaagttgctgttaacttggttttgggggaaaaaaatgtaaaaccagaaaagcctgcattacacaacctggatgttcacttgcgcgacctttccttccttgtctccacagctgacccaccccctcccagccacacctgggtccctggggtctccgcggccaccccgacaccccgggggctggccctgcagtctggaaggagacactgaggcccaggagggctgtggctgcaccagcggcgcgccgaggccccactgagcctggcaggaggacgcgcaccgtgaccctctgcccatctatttgtgtcatcgctcagtcgtgtctgactctgtgcgaccccaaggactgtagcccgccaggctcctctgtccatggcattccccaggcaagaatcctggagtgggttgccatgccctcctccaggggatcttcccgacctaaagatagaagctgggtctcctgcattgcaggcggattctttaccatctgagccactagggaagccctcgttaggagtaattatagcaaacagttgggagtgaacagtccctttggacactgcatggctcacacccccccggttattctgactgacggactcccctcttgacctggctcctcttgctaagactctacaggtcgccatgctcctgagcgtttctgtgcccggatgtggaggtgggtgccacagccgccgtggtggggtgggacctggacttcacaccggagaggggtcgcctggctcaagcccccaggccccaggccccattttgctttcgtttgtggattataaatcctgccttgcgtggagcggctgcagggcactgcagatccaaaccttttcaagtctggccaaaaatttgccccgaattaagagattgcagcctatttacaatacaaaatacaataactctaggagggcctggtggtggtatgaataaatgccgtttattctctttctgacgggataattttcaaagcagcaatttttgtaaagactcaggaagaaaacaattttgtttcatttccataacagaatccagacctgggctccgctgtgcgatctgtcattacatggaccttcgaccgccgcgcggttccagccgggacgcctttgcgtccactgcggcctctggcctctctgggaccaggactggccgtggagctccacggccagcaggctggctgggagggggctgctctgacccccgaacccagcacactcgccttgcctgcacccttcctcatccaaaggccggcaggttggcgggcagacccccctggacgaaggagaagttctggctttgctaggggtcagctgggcgcccagacggcttcagcgcccccaccatgggcagggagagcctggatgaaacacagagcctagttcccccaggtgtctgcccgcgcacctctgctcaagggctcaaccccaggggcacggctctgcccgcctctcacggcccctaaatcttgtgcccacagtcagagtggcatcgggggctgcgggctggagctcggctctgggattgggatcaacacgctcccatgcggcgatgggattcgagagctgagtcggacgagggggaccgtggctgggcaggtcggatgagacgggccgcacaccagatcccgtttcctgaagccagtcccgctgccagacggccttccccggaggatggtgccccagaaccaccatcaaaacgctcacaggctcacggggcctttgaagccgcacgtgtgcgcggtggggcgatccgccccgcggaccctgtttatggaaaacacctggcagcaattacctgctcttcggagagcggggcggcggtttctgtgaccaccgggaccctgagaacaaacaggacgttatttacacattaaagaaacacttaccccgacaccaccacagggcagcctgacgaacacggacgttagtgagcctgcggggagaagagagcccgggtcaggcggcagggtcgccaggcactagtagggacgcagtgtgtccaccgagggggcacgtgcggctgccagggcgacacctggctagcagagggtcctgggctgagcgggcccagccccggggaagagacctcgccttccccacggcaccagctgctcctcgaggggcgggcagccccgtgggggacctggcggggaaccatctgagtggcagtgtccagagctcctgccgcggacacgtgctctcagccctgagctcgggctgccaccctccccggcagtgagcaggaggcttggggttatcgctgccccccgccccgtcccgggggagccctttagatgtggaatgcgagtcacggcagggtcccctccctacgcaggagtgttccagattcactgggatgtgcccagctaagaaaccacacagctgtggggctggctgtccagggaggcctgcgcagggtccatgaggctcggactgtccccgcccaggggcaaggccagggaccgtcttcctcctaggtttgaaccgggtgcaggatgacgaccagcctagaaggcgccccttccccaaagggaggtgaggcctgggcccacctcatccgggctcctggccaggaccatgctggggaccctccctgcccctcgagatggtggacctgtcctgcctgtgcgcactgctctcctccaggtcagggcctcccccatcgcctgccactgcggctctggactgcagttcccaaactgccccttgtcagagccacacggcctccagcccccttccctgtgaggccgtgggcctggctgcgtctcctactgcacctgtgggcctcaaccagcagaccaggctccctccccagcttgctgctgtgagaaggcggtgaccaggcagctccctccagggtctgctgctgacatcagtctggccaagccgtgtcaccgccccgtactaatcacacaggtctttctgcacgtggcttagaaatgtgcagattcaactgaaagaggcagggagatcagggggcagtgttggggcaccattaccatcatcagaggttaccagtcaccaccaggttgggatactcagatagatgtcctgatgacatgtaaacaggtctcaagcagtgagacgctatctgcccgggcatcctcacggccacatgggcgcacgtcacaacacagtcacggccgagcaagcacacgtcacaatacagagctcggtagagaaagaggaaacagaacgggctatactgttattaatgtaaatggaacacacacaacacgtgtgtgtgtgacgatacccttggctcataagagaaacactaaacgctccagctgcagagggcagggattggggtctgagatgatggaggaacacttcaacaaagacaccacagcagcagaggggcttccagggagaatgatactggatgtattgaggagggcacccaggggggcaggcctggctcggcgggcgggaagcgacagctcccggctcaccgccccgccccgtttactcttgcccagtgacccctgttctggcatctctctcatttctgatcacctgccctaaactttggagccagtttgaaaacctcatccaccctcctggtgggggacttgagtccacctgcaccccagcacggggaccagtcccccatcacccagactcctgtccctcaagtgtcacatgcctggcggatgggcaaaaggggtgggctgaccaagagggtggatgtggagtgtcagggtgagctgggaagacctgtgctggtcagaaaaggacatgagtgggcttggaggccatggagtgtgttcaggggtagtccgaccactctctggcctgaggtcctgcagaagtgggggttactgggactgcagccccagtgctgtcatggggcccatgggcagccccacctgtgctggagagcgttccagcagcggggctccatgcgggaaggagctgagctgcccctaggatctggggccaggctgcagaccttgcactcggccggctccaggcctccctccgtggccactgactttgtccccaagctgcaccgtcctcgtctttgggagctccttctcaccaagccccactcagccacaggccaggtcctctcctctgggccccctgctggtgccgtttcatttctagatgtttcggctcgtatccatgccacttcgaatgtgataggctggcttctgggctcctcagtgtcccctgtcctccccttcctaggagtggccagcttggaccaccctgccctcccctccccccagtgactctgggtgtggggcctggacactcccgacaccccctcccaagctcagaggacacagacgtgctttgggggccaagtggaggatgccgtccacactgaagagtctgtgtccagtctgcaccgcacagggcctcagccaagggagagggaacagcagggcgcccctccacggggaccagggccatgcccagctttgggccaagtgaacctgcacggctccttctggtttctcgtgtggtatcctgaaccatgtggtcgagcgttggaaaactcagcggggtagcattcatcctccagggctggcctctgtgattggtcccgcttcagagtgtgtgtccccaggttcacaagttgaactttgaccctagtgtgacgctgggaggtggggcctttggcagcggctttaagccatgaagacagagcccgcaggagtggggtcagtgctcttcataaaaagagagctccccacccctcccaccatgaggcagcattggccgtgaaccaggcagaggcccttacccaccatgctggcaccctgaacccacaagtccagtcctggggcaaggggcatgtctggacaacgtgcctgagcctggctggctggagacttcagactggaaagagccttcctcggagctggccaggccttgccctgcagctgtggcctgactttgtcctggctcccagcagccctggtcctcttcctgggaggcggcagcatgctcgcgtctggcccccatgctctgagactttccagggtgctcgctgcagggtcctcccgccctgggaccctcgagtggccccccagtgcttgccattcctctccacgtcctctggaagctcccaggcccgcgcactagggacgctccttggatttcttctcttccccggctgcctggtgttcagccccggtcaagttcctcgactctgtcccgtccagcccagaactcggtttccgagaccaggtttcacattactccccccagatgtttttatttttctcctgttctcttgtcttggctcgcgttctgtggacatgttgcctcccctccaacgattctaaggccagtcttggcttctgtggcaactcctagaagtctggtctccgagtggtgagcaccttcctaggtgcccgcaacccctgaccttctgctctggctgagggtgagggtgtgaagctcgtggaaggtccagggacacggcgggctcaggcaccgtcatcaccactgtcgaggatctcaaggcgctatgtgttggggtgccccactgtcagctccctctgggcagatggaccctgaaggaggtcccccatctctgccggggggtaaaggtcagcatgccaggagcccaggatggagggagggaggcccggcggcccggcggcctcacctcctctgggcctgagtctgtcccagcccaggggccccctgcctgtctgtctggggctacagggcagccaaggggacgtgatggagacctctcaggccctgtggcctggtcccctgagtcctgcctgcctgcacctcagggccagggtctctacagtccctgtcacttggctgacagcgggcagcggtgggggcgtctgtccctggggccagctctggacccacttcctggcacgtgtcgcccagctcggtgcctcaagccccttcccgtctcccaagtgtggtggattctgatgcctaaaagcccagtcactgcacacagtcccctgcccagacccgagcacacttccaattgtaccccgcctccagctatgtgctttccaagcagtcagcacctacaaggcgcccagcaggaaagatgtgtcccctgcgtgcacggggaggtggtggggccacactgcagggtccctggggaggggggtgacacccatgcagtgagggccaggcacaaggccaaccctctccacgtccaccctggaaatgagagcaaacagggcatggcccatctcccccaaccccagcaggacccgagagtctggttctgggaccctttctgcctgccttggctcaagggagatgaggggcgtctcgccccagggggctgagacaggtagagaaacccaggttggcgactgtcctggctcaagatgattaggaagtggtagtggtggtagcgggtggaaactgtccaggaagtgttctaatggggggctctgcccttgtgagcctgggcactccacctgtctgtcagccccacctgccttatggggaccctgaccacctccctagggggaaggagttctttccatcaggcccagatcccgttacttcatcttgggggctgcctttccagatgaagccctgggccccaggaaaggctcaggccactgccgtccccctgggggcctggacgagcgtccccaggtggactccaggcccagaaaggggtggccaggtggtggctgcaggccctgaccagcctcgcccgtcacaactcagctagtagagattctgcaaaaccagcggtgctcagcccgtttgctccccaacatgcccaatgcaaagcaagaagccaagcgcccacgtgaacgccaagggcgggttcctccttggaccctcacctgacagcctggcccgggcaccatggagaagggccgcctctgcccccactgcccacacacagcccggtgggcgacactccgccaccagccagggccccaagggcgggatggcggggcctcaggcacgggccgggctgggagcagccttgcggtaaaggtaaagaaggccttgaaatacctagaagtttcttactgtccagtttctgcctgttgagggggttcgtgccgtagagcagggcgtgcgtctccgagtgcactgtctgcagctcctccagtgtggccttacgtccacggatgcactgcgggacaaaaggggatgggaggccgccgcggtcagccacagcagcaaaccggcacccgagacgcagcggggcttcacgtgcgcatgagcacagtgtgacttggttgttgtgaaatcaaaagcagacaccaccccacacgatatttgaaaaatatttgggaaatattttagagggcgtatactttaattacaacttagacattttaggaaaaaaaaaagataattccagccttcaacgctttagccttcactgtcacgtcaatgatttggcatcaatttgttattttgctttccaactgtctggtcttaaaatagacggaaaccgcctcacacgtggggctgcgctcagctctcatgaggccagaccccagctctctgggtattgagagccttcctggaggggaaggcggcccataaccagcctgacaccccgggctgtgtccgtttgcatgcttcttcactttggatattcctcagatctttggctattttcagatgttccccagaaattaccatgaacatcattcttgagttgagctacgtttacttaaccttttagaagcaggctagtttgtgaagcaagattctggtcgacaccttacactttccgagtcggagtaattcaggggaaccgaccggactccgggttgctggggcagggtttgggctctcggggccagacgcaccctgtgcagaagtgggccaggagctgcactcccatggaaacccccagggggccctggaaccattcctaacagtacgacaggctcccacagacgcctgcctgctgaccaggggccaaggacggggagcccaagatcagcaggctgtggccaagactttcgcggtctagcttccagcgtgaaggggtacaaggtggcaggaaagctgacccacccacaccatgaccttccacacagagtggctcaaagcggggagccaatccaaagagtgggggtgctggctgcaggcttgggggtctcaggaattcacggcacggcaggtcccctaacctcccctgcctcgggtcaagtcccacggccatggcctatggaccatgcctcgtatggcgagtgctcccgagtgtgcggagggcgggcctggcctccaagcataatgctgcgaggaagcactcctccaccccagatcagtcccccctcagcctgtgtctctcacctcgggtcccccttcagcctctgtctctcaccccaggtccccccgagcctgagtctctcaccctgggtcccccttcagcctctgtctcttcaccctggatccatcccctcagcctgcgtctctcaccccgggtccattctccagcctgtctgcaggcctgtctcctgggtgtggggactcctgtggctgtcagtgcccgccctcagcgttgctctcctcgcccccaccttccaggtcctgccttgaaactaccctggcggccgccggccacgcagctcagggccccacaggccgagtagcggccgggaggatggccgggcagggggtcctctgcaggaggcgtgtccaccggaccgatgctgccccccagtggcgcgtcctcattgtgtctggaagcaggtgtggcctctccagccctctgcctgggggccctatcgtctctccagagggactcccgggccggattctgggcccagacctccagccatctcctccagagatcgtgggtcgtcataaggtggcaaagatgtggggtcaccggagacgggctgagctcaactcctcaacaccccgccccgaggaggggcagatggggagcggggctctgaccataccctccagacggcgctgggctccgaaggatggacggaacagttccgctcagccacaggctcgggctttccggggtcaccctaccgagctcaaccccctgccgactccctatccctggctttgtggggttcatggtttgggggtgggcacacgggaggccaggcccgtcgtcctggagggctcccgggaggtggtgtcgcctgtctgctccacagatgacagtgccacggcgcccacagcctggagccccctgcttgtgcacagacgcccttctaccccgagcccccgccccagacccaaagtcccttacggtggccacactcctgcatcagaggggtggagggacctcacagagtccttcagcagacctgtcctccaggacccaatgttcaggggtgcagaggtggggactgaattctggcagactgaccagactgacccaccaccttcaccctgcaggcctgaggctctaaccacaccctgagaggagctttcccaaaaactcaaggaagagagcctccaatgaaaagccagcagaaacgaccgtcttcccccagatcagggccaccagatcccatcccgtggcagaggccctgggatggcctggctatgcctgggcgataagagggagcctggtgaaaggcaggcttcccagaggatgaccaggaaggggagtgggcgagagggggccggggaagggcccctcgggttcctccagagggcaggcctgcgtgtctgcctgcgcaagggcggcgtcccccaggtcatcacacgcggcctggctcgcgacgccctcagggctgccctcacctcacatttgcctcgcaggccggtctcctgcagccgcgaccagatgctctggatgcgcccggcgtgctccgggtggctgttggtgttcccgcaggtgcactggtgcttcagcatcagcgtgtcgtacacgaggcctgcagcggaggaggcaggggtggctgcgctcagaggagccctcggggtacccggcagctggtccccctgccaggggaactgagctcagggcacttgcccaacagccagggtccgcaacacccggggagccggcgagggaggcagacatggaaaggcagccctgtccccaggactcaggactctcatatcacaggaaccaggctgacccagacagtggggagattttggtcccaaactcaggtctgccagggaccaggtctatggagtagtttgcccctgtggactgagatccatccatccgaggttcttggggttcagaaggctcggtgtctgcctgtggaaatgtgcagagccgctggacaggagcacacgtgcgtgcacacacacacacagacacacacagggatgcaactgcatttgaaatcagcctagacagtggggcgggggagggtggggcgtggccttccaataacagagcagcaggacaggagcagactgacggaaacacagacgcacacgcctgtccacgtggactgcaggtgtgcgcgtgtgtggacagcaccaggacacgggccccacccgacggcatcacggagacacagccgcgtgctgctgctcacggagtgcgaggcgggaacttcaccgtgaagccacccgcgcccctttcgcagacggggaacagcagagagcgagcggggagtggccaggacgctgcggagatgcgtgtggacgcaggaagaggcccagagctgcccacagcagtgtgggccctgcagagtcctggcttcgtaaaatacaccgtgtctgtgtctacctgcctgtctggctacgcgcagacacaaccctgggcgtgtggcctgacgctgacagcggctcccccaggggtggggtcggggccacccgctgcctgctcggtttccactgtgtgtgctttctttcaaggaacatgcactgtttcctaagtttgtcaaataggaataatgaagagaaactgggaaacagcaacagagcggggctcgccggccaggacactcgtggtgacatcatgttggcccgcgggctccctcgtggggacccccgagcacccagggggcacacgcaacatgagagtgtctccactggggtcctggggttgtccgagctgtgcctcctaagcaggggcccagctcagccgatgccaaggactcactcttaaagagctacctgctgactactcgtgacatcttgccgctctctggttttcttactgcaaagcaggaatttaacttctggaaactgactatgaaactcttctccaaatatgatcagtctccttccaaaatctgacaaggagaacgtagccacgtctgcacgttacagcatgcagagaaacagtgttcagtgagatctgatggcgtgggatgaaatggaactgcatttagataacctgtcctgagtgtgtccttgggaagaaacacccgacgcattagcagaggacagggtgaggcactgtcctggggccctctgtcccaggcggggtgggggctggtggcaggggctgacccggagcccctgggccgggacagccagtccagcgcctcgactccggcagacactgcactcagccgcagacctctgccctgactcccaaggaatgcttgcaggcggagagagacttctgcatagttgggaggctgtgggtgggggtgcagcgagaccgcaggcagaagcagggccgtgggccgtccaggagcggaagtgtctgggcctgctgcgccctgcacccactccacctgcacgctccaggcgtcacccgggcctcatgggcagggccctgggcggagcctcggtccaaggacaggacagacgaaggagggcaaggtggtgaccccgccgaccctgggcgggaagctgcctggtgcgggcaggcccagagatgggcaattctctgaggccatgcttctctggggaagaggagacgggcttctcaggcaggacagaccctggtgacctctctctgtctggtgcccccagcctggggctgagccttgggcagaaggtcaggtgggtgtgaggctgggcaccacccgggagcctcgcccagtctgagcctcgccctctggccccgcaggccccgcgtggcacctccctcacccctgcagccgtggctcccccgagagggggccctcgctctcccccggcccccaacaccccggcccccaacaccccgccccacggtacctgtggtgaaccttggcttggctggaggctcctgcacggacatggggaaggtggcggatgcgggggaggactgcgcccgggataggggccggtgcccgccaaaggacacggggatgccagcggcctccatggacgcctggtagttcctcagctggtggatccgctgctgctccaggaggagggcttgctggaggcggaggaaaggggccgctgtgttgcttcccagagtctcccgtccccggctgtagggctacggggggccctctcccccagaccctccaccccactgcccccaggctcccagtgcagagcctcgtgccaggctgccggggagaagcctgccctctgggccaggagggcggccagtgaggcggcggcctaggcctctgctgatgagtctggacatccccatggggagaaagactcagcggaaaagcctgtccagagctgatggggggcccaggcagcctgggggccgtgaagggctccttgaggaggtgacacctgggaggcggggtggcagtatccaggcagagggtgctggtgggggggtggactctggggtgtgaaggcagggactcggggtgggtccggttttgcccagggaggcggatggaacctggggagaggtggtgggacgggggggggcgggggggggaccctgcccggccctgccaggagcacggctgcttctgtggggacccaagaggtctcctctccacacggccgaggagggaagggcaggacaccctacttcgggtgtcctacggtggggggggggtgaggagcaggccgctgcccctgccttgggcctccctccgcaggtgctccctcccacggcctctccaggcgtgactcctgaagcccctggagcaggtgcccgtctcaaggtggctgcagactgctgcgcgtgccaccgcatttccccaagacgagccctgctgcggttctcccaagaaccagaccgccagtgcctctgaccactgcctcaggctcagagcccagggataactcccctaagagaatgccgaccaccttatcattggcaagacagcagccctaaaaaactgcctcccagtttcacaccagcgcagtaagagcacgctcaactccagttgtaagaggaggccgctgcctctgtgagtgggcgaggccctgacctaagcccccggcgtgggaacgaggcccgccgcccggacggcccgcctggcgcgctcacaccgcaggagtccacacggcagcagggacggtggcttctgctgtcctgccctccttgctgtcattagcactggctccaggggcccttgaagagcaggggttttagcactaacactggctgagacatgagacaggctgccctctgaatgagaactagcaaaagtgaccgccagccacctgtggccccgcctttaaacgcggaaccggagagaaggctgacctgctacccaagaggggctcccgggaaaccgaggcgctgagctgagccttggtgtcacctccatcctggtcccggggtggtgggggaggcaccccctgggctgtcgggggaggaggagtatgcctgggcagccagcactgggcccacagggagggttgggtgagccagggccccacagcccaggtgctgagctccacaatgaaggacaccattagattttagagtccagccctcggacgccctggcccagcttctcaggaacaagaccgctccctgggggcactcaggcctaagacggggtttcgactggctagctggctgtccccgtgctttctcgtcccggccgttttattcttcactgtaagttaatgaatcatccattgggtgtattcgtcactcttaggagtctgttaactgtcagcgccagggaacctcactggctctgggtgtccagaccaggctgcttttctggatctgttaggctggtcactagtgtcttcttgggcccaaaggtcctggcttctgaccagatgctgcaaaccttcttgatcaatgattaagtcagcctccctcttccccttctatgctgaatccaccagcattcggatttgcgttaatctgcagcctttgggcctgaagaggaaccatccctagggagtctgtggcttgttcagctgagaagcaggtgcataaatacacacagtggacagagggccagtgtctctgggggtgatacctgcaaagcagggctcacgtcacatctgcctcccgtatcaggagggaaagctgggggccaggaccggcaggtgtggaggacgaagaccttggactggctctaggggccctgctcaccccctgctgcccgtccccccagctctgcgggcacctgtctgaagagcagctcctgctccgtgggcggccgctggccggggtccgcctcccgtgggggctctgtctcctcgtggtcactctcgatgggctcctgcttcacctgcaccccggccagcgcgtgggcctccttctgccccgggagccggcccgggaagggctcccccaggagctcctggtgctcccgcagctcctcctccgtctcctcggggtggctctcgggctgccgggcgggctcgctgggtttgggggtcatctgtaacacagggttaccgggtggagcacggtggggcgggggtgagggggctgctgggacaggaaggggtgggcacagagcccacgtctcggggtcagcggggctgacctgggctgcggcaggacacacacagagcccacgtctcggggtcagcggggctgacctgggctgcggcaggacacacacagagcccacgtctcgggatcagcggggctgaccgtccgaggatgctgtcatcctgggctgaggcaggacaggacacagacacacagacacacagacacacactgagcccacgtctcaggaacaatggggctgaccatccgaggacgctgtcatcctgggctgaggtaggggacatgcagacacacacacaaagacacacacacgcatgcatgcacgcacgcatgcacacacgtgtgccgggcgctgtccatggtgtgtgcacacgtgtacacacacacacagacacgccaggagctgtttgtggcgctgagataaaacacagtcacacacacacacagacacacacagacagacaaagacacagacacacagagacacacacatagacacacatagacacacagacacacacagacacacatacagacacacacagacacacacagagacacagacacacacacagacacacacagagatacatacagacacacacagacacacacagacacagagacacagacacacagacacacacacatacagacacagacacacacagacacacacacagacacacacacacacacagacacaaacacacacacacacacagacaaagacacagacacacacagacacacatacagacacacacagagacacagacacacacagagatacagacacacacagacacacacagacacacagacacagacacacacacacacacagacacagacgcacacagacacacagactcagactcagacacacagacacagacacacccacaccccgggtgctgtccgtggtgctgagataaaacacagcctagtgtggtacctgctatcacatgcctgtttgccaggcacagtgaatcgcaatgcagtcactcaccacaatcgcaaggtgtcgacccatgtccatacctgggtgtgaagtggggctggggggggtgcaccctccttccttctcagtcaccccacccaccaccccagcagctcacacccaggcaccacagggacaggcggcctctgagtgtgctcacctgcgccgctggccctgagcccgcagctggcacaccacgccccgtccctgctgaacttccacgcacaagagccccgccctgccagggaggacggacccttcctcatgtcctgtttctagaaggaaaccaagggcttccaagaagcctcaagttttagtcctgagcacttgtgtcttaaaaagtcctcctggaagcacctgctccctgacccacacctggacgagtgcagcctggcccatgaaggggggcctggggatgcctgtgctagggctgggctgcaggcatggtgagcagccgggccagctgcaccgcgggccccagggccaggccccaggggaggacggacccactggccccctccggggcagctgccactgggcgagggacttgttctagtgaccgtcccctaagctgctgtactaagctctgcaaaggaagcacgctgtgaaaggcaagcccggtccctctctacatccgccccaaggcagcatatcctcaggaagatccaatccagctggaacatggaggatacagctccgggagcaggtccgtgctcagtggaaggtgaggggtgtgagtggggacaaagccgcggggtgggcagggggcagacaggctccaaaccatttcgagtaaacagtcctccaaccttccatctggtgatttgactgacttttcagtcgttcatccaaaaaagtgttctgaaaatctgtctttgaagatttggggatctgtccatctcatctgcttcctgcatacctggagctggtgaggccccgctatgagctttgtgcctggacagagtccactgggggtgagagcaccgcccccccccccgcccccgatcgggctgggggcagcaggacccatctccaccagcagagggcgctgggcctctccctggccccccaggtccacaggggtctggaaacctcagcaggtggccaggagcctcagctttacggtccgcggggccaaagcgctcgcgtttctgtcatccctcagcgtctgatgcagagcccaataggtaacaggctggggttgacgggaggtttggggagcccagggcctgggaaggtggctgggggacagactggtgagtagatgtcacagcagagtgacggggagggaacaaggatgggggagagtgggcgcgggcaaggcccctgtgctgtgctccagggtgaggctgtgagggaagaggctgtgggcgctgcgtgggggtcagcgaagaggacacggggacagggcgtggacagcggggggaacatggggatgcgagcccccagcagcacagacttaagcctccagacgacggtctgcaggcaggtgctgtctcagagcgggaggcaagctcctctctgctgtgggaagataagcagtcaggctgggaacaggtggggtcaggggactgcccgcagagaaatgaccctttgggggctcagtcgggagggggcggaagatcagcagaggggctggtccaggcgcgccgggggaccgcggggattccaggccaggtgcctgaggacagctgcacggagggaggtcggggcgggaggggcacgggacccgggcctgccgcagagaggctgagacccacactctgggcgacctgcgaggggctgtcctgggaagggagatcggagcaaggggccgggctatgggccggggctggaaatgatggttaggaagaagcaggcagacgggaaacagaggcgaggcttttcccaggggacttggagaagctgtgtctgatcctggaggagccggggctgccccaggccctgccaggaggtcagctccgagtgggcacgcgtgaccttgggaatgaccgcggtgacccagcagcaaacagcacacgcagacccgctctgtctccccaaggccttctggacctcaggagcaccctctcaccaactaaacgagaacggaggtaactccatgtttggaacaacaagcttctaaaagccagactggagttcagggcccaaaccaaactggtgagcaggccagcgtttaagattactggacacactcaccattggatgcccaaacaatcgggccccagtgttcatgttcacaactgagttgaggagcagtagcccatgcgaggaatggctgagaccctggtgcactccagccagggctgtggggtggggctgcgggccttggctcaggagccttcaggccacgggcccggaagacagagggcagaaatgtcggtgctggcagtgctgggtacgactgtcagctccctgcaccctccgggagatcagtgcataaacacttcaatcagctgtcgctcgtgacagcaaatcaatcacggagggaaatccagagagatcagccgcgtctgtctgtctctctgttggagaacataccacacgtgaacaggtgttcccatctttccagtctcctaccctatcactcagagaacgacacaacacaattaagaagacagtcggcatcagaaaggtgacacagagtgcctctgacacttcggcctcatcttgcccaccttaaaggtgcctttcctgccctgcagggctgcattcagccacccaacccactcccgaccctgccctgtgccatctggtaggggagcccgccaggcagaggggctctggggcaggggtgctgagcctgtgtcccagcgcttgggcagcagggcctggtctgaggcagcttgctgtttgttcagggcccccagttctcccaggacgggagctgctgggcaatgtgatggctctgcctttaacctttggaggaaccgctggacagctttccagagtagttcctctcattctctatcagaaaagggctttgcttccaatgttagcatttggaaccagttatttgaaactgctgctcttgcttcaataaccagcaggaagggccacattgacctcggtgccgcttgctgctaaaagcaggttgggagtgaccgaccagatgttggatggagggacgcagacctctgggcaggagccctttggccgaggtagctgcaatgggcaggcagagcgccagtgtccaggggcctgtgcttcgggggccctgtgcctctgctgggcactctccgctgggcactctccgctggggactctctgctgggagtttgcttacgaggataaatccccttaagaaaccccagagacccgtgaggggcaaggagaataagccacccagggacacagacgcttcgggaacatagcccaccccactcctgcctccttcatgcaccaatgggacaagctgctcactgcccttgggtcccggccccgccccgacgtgttccaggccccgcccccacgactcctggccctgccccgcgcctcaccttgttgaggtgcagctgcggctgctggaagtgctgcttgtgcttctccaggaactgctggtgctgctgctggatgaccaggtgctgcagcgcctgcgcgctctggggcagcggcgccgactgcgtgcggcccagcgggcggtgctgccgcagcttgtgcacagagggcgccacgcgctcagcccctaccaggggctgcgcgtgcaggggcagcgcgcccaggcctgcaagatagcggtctggagagagcacggggaggggaggaacagaagggaggggcgaggcttggtgagtccgtgatggaggctggccgccacagcctccccgaagcccgccaggcctgctcctgcacgctgaccacccgaagcctggacttaggggcagcggccagtcatctggtccccccatacccaggtccaggtcgttagtgggcagccccagcacaggcgccctcagaggaaggggccagggtctggtggctccagaatgttctggaagaccagcgagtgggcaccttcctgacagcctcagaaacccaggtgtgaggaagacacttgcccttatgaaccaaaccattttaagggtctcaagacatcgattttatacacaaagagggcatcaacacttgaaaaaaattctgatgcatgttgtcaaaatctctgcaaatttctaggaaacgctgtcacctgctgcccaggagaagggcagcttggccgcaccgtgtctgggctgagtgtttaaattaagaatctgtgtggacagaagagggtaagtttgaatctgtgtttgaatcttgcttcaaaatgcaacctcctcatgtgaaccaggaggtggaatgttctcctatattcctttcaaccatcagtactttttcttttacaaattgtgggtttagacagtttaccattttccctggtaccacaggcaaaagggtgtaacagacccttcccagggcccctgagtatctgtcccccggcaccagagctggagaaactaaaccacatcactcaggctgcctgtgaccccagatcagggcgtctgaccaggaaaatcacaggtggacaggccatgccagctctcagccacccagtgctgactcctggcggggggggctgtgttgccgtgtttagtcgaacccaagccccctccagggggtactgactgtcagtctttctctagtcccttcctggagattatttctgtattaaaatttttactttgtgtacaaatacaaaaaaaaaggttcaactctagcaaaatagtccttcactaccttttcaaaaagttaaccagtcatagttctctaaaccaccatcactttttatccaacccaaacagttttctggaaagataagttatcttaaaccttatgatctgcttggatagtaaactaaagtaaataactcgaaaggtagaaccaattctgtcctgggttttctattgatagaaaagttaaaaacaaacaaaaacacagcatcagcgtggagaaggtctttcatcagttgttggtctggtagctcagacagtaaagagtctgcccgcaatgcaggagatccaggttcaatccctgggttgggaagatcccctggagaaggaaatggcaacccactccagtattattgcctggagaatcccatggatggaggagcctggtgggctacataccatggggtggcaaagagtcagacacaactgagtgatttcactttcactttctttcacttggtctgggtattatgggggattagatcatttcaccagcttcccaggtggcgctagtggtaaagaaccctcctgccaatgcaggagacataagagatgtgggttcgatccctgggttgggaagaccccctggaggagggcatggcaacccactcctgtattcttgcctggagaatcccatggacagaggagcctggcaggctgcagtccatggggtggcacagactcgaacatgactgtgaaagtcactgagtctatacagtccatggaattctccagggcagaatacagcagtgggtagcctttcccttctccaggggaccttgccaatccagggatcaaacccaggtctctcacattgcaggtggattctttaccagctgagtgaccggggaagccctaagtgactcagcccgcaaattgtttcatggagggaaggatgtcagccactggacgctgcacttatgggattaaaagtccacttagtcactgaaagtcaccctctcagaagacatcacttgtttttaaagcttcctgagcccccgagaatgagggtgtcacaggtggcagggctgcagagccctgcgttggggccactgggctggccatgccagcagggaagcggctctcggttttagaggaggaaacacttaattccagagatccagtgtctgctgtgacccccgtcagggaaccaggaccccaagcgagctggaaaggcggggactctgggtgctccagggccccctccctgcgattggggcttcagccacttgatgctggcccagaagccggcttggccaggaagacaccaccctgaggacacaggcctgtccctgcagggtgtgggcagctggcggtggagaggccggacttacagtccccagtgccgggggagcccgtgtctacacggagccccggctgttcaggctggaccccggtctggttcccctccccccccacctcttacctccacccccttcaccccagattaggctgtagttcttccggcagaggggtgggtaaagctgtggggcccccacacttgaggaaagtgtcatgatcagcaccccttaaaactggacatctgaccttccaggagaaataccccatacctggtccaatgtggactcaggccacacttgagttcagaagtttctggttcagaactggaagatgacccctcagacctttcacaagagcttttgatggtaactggaaactggctggttttcagtatgtgctgtgaaacttccaagaaagagggcccagcacattagggtccaattctgtcctagtgaccagctggcctgtggaggctggctggatagcagggccctggcagcctgtggctgcccttgtccagccccagtgaagggacctgagggtggccggtgccaagcggctcctcccggggacagggcgggccagcctcctcagaggtcctctctggggcaggaggtaaagacgacaacgggacgggagctcctggtgagcacccagcccttccgtggacgcctgggctgaaggtttccttcacttgcactaacagtaagtgaatctgcagacaaaggtgctgtgcagacgcccccaccaggtatgggggttaaagaaaaagagaagttgaaaagccaaatcgccctctgttctgggcctggttcggccgcgccggccttggcacgggggatcctgttcagttcatgtggattctcacgtgaaatccacgtgagacaggtgactcctgtggcctgagcccttacacacccactgcccaacttaaagagtctttacagctggggtgtgtcgacctgcacaccccaccttgaccagctgctcagagttcaacctgggaactgtctggggcactgggctcttttcggtagaagactggcacgcgatcaccagctgtcaggagcctcctgcagcagcgaggaccgaggctgtgggagccactctgagcaggcgccgtgtggaactcacacccgcacggctgctccccgacagacccaggccggctgctcctcccgcacggtcagcctttgtggaatgatgtggccctagctctgacaccatctgtccacagtgaccaccagcaagcaggcacgtctgtgggccctgggaacctcagagaacctaccagaagccagcctgcagtgtgagcccgatcctccttcctgacatggctcagacaccgcctggcaccaggtgccaccgcagaggtatctgctgtgccctttctggcatcagacgctgagggggtgccgggcggggctgcgcaaggtaactcggtgtctgcgctccgggggatggaggtgcacagagaaactgccggtgctgagcgcccgggaggcccccgagctgggcctgacgtggaggaagggctctgaggccgggcatgcagaaggcgatgtgggcctcgtcagtgctgggtgagcctgcaccccgagcgcagcacgggtcgggggctgtgcgccaggtcggagctgtctgtgctggtggaatggtccccgttcctaccacgcctcagccagtggccacatgagaacgtggcaaatcgcatgtggcctggagaagccatagccggcccccgcttttaactgtcactgtccaggggagggatgggggcaggggtcgttggggaatttgggatggatgcatacacaccactgggtttaaaatggggaactaacagacctgttgagcagcacacggaactctgctccatgtggtgtggcggcctggatgggaggcaggtttgagggagcacggatatgtgtgtatgagtggctgggtccctccactgcccacctgaaacggtaaccgcactgttgttaacaatgaaagtgagattttcactatgaaagcgaaagcctcactgctcagtcgaatccgactctgcggtatggactgcagcccgccaggctcctctgtccatgggatttttctaagcaagaatactggagtgggttgccgttcccttctccaggggaatctccctgacccatggattaaatctgagtctcctgcattgcaggcagacgtttcagtgtctgagccaccagggaagtattgtttgttaattggctataccctaacacaaaataaaagtgaaaagagaaaaaaaaaagtgaaaaagccacaacttccagtgtcaatgtgaacagccacagctctgggcctggggagggcttcctggcatacctacaggagtgtgaggcgaccccagggaggcccgggaacagggagtgggccagggaagggcccacacgacgctgggaaggacagacaggccagctgggaagtaagggagagagcaagggtgaatgctgagaacgataaaaccaaacgtctccaccagagcaaccaacagctgaggggaactcccctgctgatactgaccctgggggctctgtcggccctcctaaaacctggggaggaagctaaagacccagctggatggtgcttggacctgggaggtcagctctgcagcagggccccctcatttcacagcgaaccctgagcactctgtcactcggaagtaacacctttacactgctgttgctacgcaaatcttatagcaaatctgtgtgtgtgtgtgtgagtcgctcaatcatgtctgactctttgtgaccccatgtactgtagcccgccaggctcctctatccatgggattctccaggcaagaattctggagtgggttgctgtgccctcctccaggggatcttcccgactcagggattgaacctgggtctcctgcattgcaggcagactctttaccatttgagccacggggaaagccctaatttttttttttctaaacataaccacccattagatggggcacattaaaaaaaaacaacattgctgctgataggaacccgctgcccagcagggccagctctgtgctccatcacaccctgagcacccaaagggcagacacgtcagggagctgcaacctgctctcgggaaatcaaccaggtgtgtctgacgctctggcttccacgctcctggctctgtgagtggactcggcctctccggccacagcctggcgtgggagggcttgggaacaggagttctgggggacaggtcacccgccctcccccagggagcccaggacggcccgatgtggcctgctcacctgtgacaaggggcgtctgtgcaggtggctgctccaggaggaccacgtgttgcaggagggagccaggggccgcgccggcgtcacgctccaggggcgccgtgcccaggtagggggcgaggtgggtgccggggaagagggagatgcgctgctgcagggcggggagggccagtctctcggcctcctgctggccggctgccccctggacagacaggcacagccgggcgcccgggtcaggggcctggggggcgctgccccgcatcaccacctcgcagaccccaggggcgcccacttaccgtggaggggccggtggcaggcagccccagggtgatgttgggcagggatggtgaggtgtaaaggggcagcgggcccaccgagccctctcgcgccacgagtctgtgcgccaggctggtctgcggacagagcacacgggcgtcacgcaggctgcactgccggcctgtggccctaagcctgggccacaggaagcgacgagagaaaccctccagggcaggctgaggtccccggaacagagacatgtgaacaaggacagctcggaggcagacaaagcatcacaaagccatcaattgattcacgacctgtccctctcttgtttgctcttgttcaatccaaacaacactgtaaaactatcagaataaacctaggataatattcttaaaaatgtagtcttaggatcaggaatgtctttccaaacatcatgtgagaggtaggaaccagagagggaaatgtagattatagaaaaatgccttcacataaaaggcaaataacagtgatgacaaagttggcgactgtagtacagacaaaggcgatatgtaaagagcaagcaaatcaaacaacaatgagtgagaagcaacaaagaagagccaggatggagaagaaactcatttgaaaaaaaacatcagcagtaatctaaaaaaaaaaagatctaaaaaaaaaccattaaaaaacctatgcagttggcaaagatattttagaatgacaacagcatcttgacccagagaaacataaccgtactgctgggtgggccataatcagcctgctccttctacaggacagtttggccatccatgtcaaaagtcttaaaaacagatctagcctttgatcttaaaccccactccactcgcaggacacactcttgggaaaggaagctggacacagatggacttgacctcagcagcattcacagggccctacagccagtcagagggtaaatccacgaggtgtgttcacacacaaggacacagtcatccatggggacactcaggttggaaagatcctgtggatgacctggaatcttatttaccatgtgtgcttaagtgccagtctccgagggcttgaatcactgtcgtattccatgtcgttttgcctctagaatgaaggttcctggcagaaaggacactgtcgtattcacactgccccctctcagtagtagaaaatgacactaatgatggacttataaccggttttctcctagctcttctcacaatggattatagaattaaggctgagaaacattttgcctgctttaagatttcactggcatggttagaaagaatatgagctgaaagttactgtgaacaagggcgggactgcagccccggccataagtgcccctcggttcatccgagggtggagcgatgaccacctcggtgtgtgtttgctggagtcctgtgccgggcagcagtccctgggtggcttcctggtgtcacacgcacggtgtcagtggaaactcacacatacttgtgctctgagggcaccgtaggaagggccactcgggagggaggttagagtgtctctcctagtgaaggctgcatcactttactctgttcacatagtaaatggtacagtaatgactaaagggcgactttaaaagtagctctttttctggttttaaaaaaatcagcaagctctgatttagagaaagtgactgagcttgccaaggaaagcatgattccactgtattatcattgtccaggaataaaacaagcaaacactgaatgcttgaaagttgtcatttcctctttataaccaagtcttttttccaaaaaaacaaacaaaccaaacctgcttcacttttagaagtcaagcagccttctgggaactgtctgatgtgctgactggctcacgtttccgctgctggccgtctacatctgccctatggcatgccgtcagctgcccaggaaggccggggccggggcagcacccccactgccgtccccagatcccacctggctttcagcatcgcatgaagctccctccctggggagaggcttccagggtcggggagccctgctacccccatgtaaggacgatgctgaacatccctcagtccagctgggaaaggggctgcaggactgggccagtggccccctcccgtgtgaggacccctggccgcctctggacgcgaggaggaagacgaacggccagctctggcctcgagattacagaggcactcagggaactgcccaggcctaactcaactgaaatccacgaaggacatccaactgtgaccacattttcaagggctagccctgtgattacagtaaagatctaacatacaacacaccaactgcaatctttgtttcttgcaaatcctttgacatcttctattaatttccagtagcttaatttacatgaaaatgcaatttgtaaaaattaacatgcaacttaaactggcatccactcaaataaggcatctctacagtagaaaccattaggtgagtacccattgaaataaaaccgagatctgtgagcacaactgacaagccacatgcagcctttacagctcattctgggaagcaatttctagggcaagttctaaggctgataacagatctcagctatgacctcagcctcacagagacggattgttaaaactcttaatctaaacaagtctttaaacggggaggctgaaaggcacaggtaataaagacgtacaaggaaaagaacaaaggggattaacaagcaagaggcagcagcatgaaatcaactcagtttctaaaagtctgctttgtatcttaagtgtctaaaaactgaaaatggagtggacacgtgggcctgtgtacttcaaccaaaacctgtcagccctctggaggggcaggactcatttctaaacatttaaggaagagagcaaagtaccgtgtttgacaaatgacagcctcctgtaagttggaaggaacttaaaaaaaaaataagacacctcacaagaacctcacagtcaggaccatctgagcaggaaacacacggcacagccggctcagccccgggaagcggggtgtgcagcaggctccccttccggccagcacccgccctccccagttgagtagaaactggccctgcgtggaagccgcagggctggcaccaggtgggagctccagacactcgtggcatgagccgggggagcagagtgaagaaggaggaaaaagaaagcagggactgaaggttctggaacattgccctgacccaggtctggtcaagggtgcagcctgcagccagtcctgaggtcccccgcctggctggagcagccccaggagggttctccaggagcagcctctcaacctgcagcacagctggggtctgcccggcagaggtgaggggcaccgccccaccatggcctgaggcttggaagtcctgagatgcctcggagactctgccccgacggtcaagatgggagggtggctggacaccgccctgcggacgagcgcgccgcgcactgacctcggccgggatgctggggacggcgggcgcgatcccgttctccgtgctcacgttcccggagctgttgttgggcgagctgggcgcggagcctggggcactgctgcatgccgagtctaggagggagagacactcgtgagcctgacccaggtcccggcgaggaccccgaggtgtgagctgggttggcctcccgctgtggtggccctctgttctgagctggccgatggtggaaaggacaggaccacagtccccacccaggggccatggagctaattccctgctcccggctgtgctgtcgactcgagaccttcacaaacgtgtgaccccagatgcgcccctgaaaccttctgagctgaacacacactgtcaattttactcttttgtaaatgatcatgaacaccagaaaaagaagccctgaacaatcgttaacattgtaacaacaagagacgagaaagcacagaggccgaacgcccgtgaacaggggaaggtcaagtgcactgtgctcacgtacacagcctcctctgtcagcgtctgctctgagccagtcctcgagttttccagacatcctgggaaaagctcagctgttggcctctgtgactgaccaggttatctgacaatgtgtcccggacagtctccaagcagctgtgctgacctgtgtggccccatctcacccaccatggccggggctgaggatggagcgtgtcccaccccggtcctcccaccctcactgccgaaggagccactactgctgtgtgtgcaaacccgtgacgggagcccctgcgactctctatggtgacaggaggggtgtcttgcgtttctgagttctcgtctggctggatggtgtccaacaccggcgcctccaggtacagcctctcagagggaaccagcctgagctgtctgcctttccctcccgagtgcctgcttccctgatagctcctcaatgcaggagaccccagttcaattccggagtcaggaagatcctctggagaagggctaggctacccactccagtattcttgggcttcccctgtggctcagctggtaaagaatctgcctgcactgtgggagacctgggttcgctccatgggttgggaagatcccctggagaagggaaaggctacccactccagtattctggcccagagaattctacggactgtatagtccatggggtcgcaaagagtcggacacgactgagcgactttcacttcactgcctgccccaagcacactgaccacgggacctgtgacgacttaacattctaccccgacctagacttgcaggcacacggagcggaagcctggtccatctcctgaagctggatcccaaaggggctcaacaggcatcttccagggcaaatctccacgccctgctccccgccactgaggcccggcccaggagcgcgagcccatagagctgccagtggggcctggaggactcagacttggttccagctgaagtcggggcaacagtgaggaggctgagggtgccgtgcggatggacggcagtgcccactcccgcaggcccagctctcacggagaaggagacccgatcccaagggcacatgcatgaccccctccacccaggggaccgcgagcactcgagtcctcgccaccgagcagccgtccccctgggaacaccctgcagcaagtgcctctgtccactcgaggccccctgacacccccgcgtctcccccgtgcactgacggtgaccccaggccctggttccccacccaccggatccagagcctggcctccaccaggttaagtcacgttcacactgggaaggccacctgggctggcacgtgtcacaggtcaccctccaacacccaccacgggcatcgccctgcctggccaccctccctgctgtcagcctgcccccggtggcacagagcctcccctctggccctgctttaaacaggcccgcccagcaccatcggcaggtaaacccttcagagtgggaaaccaggacaacttttgggggcaataaaaatcatatgtcatctctgcaacttttcacccatcttcagctcaacagtgtttggactactttttcactctacttcaaggaatctggcctaagaaagtaaatatgaatgcataatcaccatggtatcatttgcatcgacacggtggaatatcattaaaggcgcaagagtgttgtgactaatatcgagtgggaaaggaatcgagtgtacacagggtacatgccagacccgcacagaaaggactggaaggaaatacactcagaggttaacggcatttctctggacagggtcagaggggtggctgcttctcctgtctgctcgccctgccaggcacagctctgatgagggactaggcacacacggtgtgatgcggccaggcccctgacctgtttcatgaacatctgagggccgccactggccgcgccctcacctccgtccctcctggcctccctgtacaggccagaggagccacgtctgggatgccgcggccctctcctccccaggaccccaggagaggggaccccaccctcctgtccagaggaccttattttcccgtcttctggaaagccagctctgttcagagcattctgcaacccccagccccctggggctgtgctggaccggaaacccacccccatctccgtgtggcctgtgcccatacgtcaagctccccctggcccagggggcacccaccgccctcctttcctgcttcccgcatgctgccctctctggtcgatgctgcccagcactgagcaggtgccgcaggccgtgtgttcccagccccagtgtggtgcctggtctctggagtcagagaggaagctgctgggaggtgaggacgcagctcagcattgcagtgcccagcctggtcctgacctcacaggctgagggcgtgaaggccagagccagccccaggacagaagtggccaggcctgaccagtggggccgctgcccccggaagagactaggcctcggtgcgggaggaggggggggaacatgcgccctgcctcttgcgaggcccgagtctgctcggaacccgcggtgagggcggcctggtctctctatcagaaccaccgggccccaggccctcggcctcagacccgacttctggcaggctccaccccggccgcagggcagggctgagggcgcccagctcaccccagaccccgcgctcagagctgaggctcctcccacggcgcccaggagccccttcttcctggggggcggccctgagaactgcgggtctccataaaaccctgtccttggtgctcacggaccctccccgcctctttccaggccacctgggcaacccctctgtactgtgattccaggaacgggggctgtgcgccctctgcacgaggggtgcgccctccggaggcggtgtgccccttgagagtggcgcgtgccctcctgaccgcacaggcccaggaagtggggtgtgtcctcgggaccaccaggaagggcctcggcccgatgggtgtgcttccgcgcgtcggccactaggtgggggccgagagcagcgcgcggacccggcacggagactcccaagctcccgcctccttcccaggaagactgctgtttactgggcaggggcaggtaagagacctgggctcaccacccacagggcgggagctgttaaacactccagctccagagaaccttccacttagaacccctgaccgtcttccgggatgtccgggggcttgactgctctcagctgccctgtgggtccaggctgggggctggacatgctgcccaggaacagggctctgagcgcctctggggaccacctggggccctcggactcagtcctgggggctggcaccgccctcgggactcggagggcgggtgtggatgtggagagatgcaggcttccctactaaagggagagcgtgcaggctggcctctctgagatcggcaggcaggcggtggggtttacactcaaagtacctgtgacatccaggggacgctttttcagagccgtgaccactggcccatctttcctgcgtagcagggggctgctccgtctctcagccactttctgctttagcctggagcgtaatttcaggttgggttcagaagctgcagggaaaggagacgtcattaccggccggcagatacaacgggggccaaggtgcctgggggcggtttccccgactcctacatcacacacgtcctcgctcacctgcaaatcaaagattcccccacgtgtgacagcccaggccggctgcccactcggatcccagccaccgagaggtgctaaggccaacccacctgatgagagggttagccacctgcctgcaggtgagacccgttcccctccgtgtcgcctgaccccccagcacaggtgtgcgggttgctcttggtaacagccctgcttgtgcgaatggagccctttgcaaacccgcagcggtctggcttctgcaccctggaccagtccagtctcacgtcagcgtggctgccttgggaagggggcagcctccctcagcggggccctccctgtggcctctggacacccgagtcagccccacgggctggcacttgggagcccgtagcagcggtgagctcagcaccagacttctgcctttggaggctttatgagttcattcaagcttctgctacttgtggatctgcaaaccggtgagtttcttttacctcttgtttttgtttgtaatcagcagctgattttaatccttctggaaaaggaagtttaccgctctctagagcaacaagcaacaggatcagacttcccctcagagttggaagtaagctggctggtgttataagaatgaggccgcgcgtgcgtctcacggccactgcaactccatcctctggggagcctgggggcagggccgggggtgccggcagtggggtgaccctggggggtgctgggaggtaaaggcgggtcctgggaggagggaggagcagcccgcctgaagggtgcttcccagagaaatgaggtgtgaggcgcgagcaaggtggcagcgtcgccagatgcgtagcctgctccggagaccccgatcacagggcagacgccctctgctctgcagtgtctgtctggatggccaggttccccggcaggatgttcgtgtccaaagaggaaaaggacccagtaatggagcagccatccctgccggcgagaggacccgcttctgtgtttttttaatatttaatactgtttttacatttttgagaagtggagcttcacgtttcatttatttctatttctacgctcagcttcttactttaccgttgtttgaaaagaaaaaaaaaaaagcccagctccccggcgagattaacaggatcaacccttttccccgcaagatgccagctgagcctgcacgaggttgctacagccacatgtccgtcctggggaggagtctgcccaagacccaggaaggacagcgcggcccccgccccagcgtggggggccctgttggcagcctggtcctgacgggggtgtcccgggaggtctcagagcttcggggcccaagagtcagccttgtgagcagggtcaggctccggtcatttgcagggtaagacaagggcctgagagccccgaaggaaggtgacgctggacctagccacactgtccatcactcgggagccaggataaaggcacctgccagcaggcaagggctccagagagtcacgttccgcacacagcttctcagaaagctcggaggagctgcacaaccaaggtggaggaggggacgagagccaggagcagctggagtccagggaagaggcccgggaggccgtgaagggcagtcagggcctggagcagagcctctggactgcctgccctggaggacagcctcctccgtctgccaaatcgtgcggctgaattaaaaacagggacagggagatacccagggcagagctgatattttataataactacaaatggaatacaactttaaaaaattgtccacttgaaagctgtataatattgtacatcaactatacctcaattttaaaacagaggcagacagaaaactaagcaaatgaaacataccatcaacttcaggataaagggaagtcacacacaaactgggatgcagtcaaggtcatgggcggtttacgtgccctttctgtgcattgccgtcatgacacagggccgggcgggccggggccagctgttcctggagggagccttgtggggctctgtgacttatggacagttacttactctgataacaatgaaaagagaactctagaaagacaagggcttccctggtggctgagctggtaaagaatccgcctgcaacgcgggagacctgggtttgatccctaggttgggaagatcccctggagaagggaaaggctccccactccagtattctggccaagagaattccatgaactgtatagtccctggggtcgcaaagagtcagacacaactgagcgacttttcttcttttctagaaagacagaggacaggctggaatacaattctttgtagcatacgtgacagacgcaggagggatattaatgtataaagcaacgagaaaaaagagccggccgagagaaaagcatacggaggagctgccactgagccgacattggggaccgtccctgagtgcccggcgtggcggcagatgctgggcccaggggggtgcgcctggccagcacgcacgccacgaggctcagaggcacgggccacactgggccctgggaacgaggcccagcggttctgcaatgcggcgctcagcttactcccgagcagggacgatgggacgtaacagacatgcacgtccctgacggggacggaactgctctttgaaaaggcagagaggtcacggcttcggcacccatcaggctggctggggtgacccgtggaggcatcgcgtgagtgaagagggacgaggacctctcacgagcggagggtgcggctcagcaagctgggctttgtaggctctgcacacgctttctaactcaagagtcgatcctgcagcgtgactataggcccccatatttgagggcagaactaaaagctagaaaacagttaccactgctacaataattgtaagttgagataatataggaaaggtgttgaccttatgcgttgaaatggagtggtaccccagatacaacagtaactgagaggtggagctacagcaaaagtgcaaagcagatgttttctcgacaaagagacagtccatgcgtatcacccgcacacagacacccccccacacacgccggcatagaccccgtctgcgccgtaggcaccaaaccagacacagggctgcttccggaggtcacacgcgtgacgcatgcatctgacttatgttttaacttgtcggaattcagacttaagttgaagaaagtagggaaaaccgctagaccattcaggtatgacctaaatcaaatcccttacgattatacagtggaagtgacaaatagattcaagggattagatctgagagacagagtcccggaagaactatggatggaggtttgtgacactgtaccagagacagggatcaagaccatccccaagaaaaagaaatgcaaaaaggcaaaatggttgtcataggaggccttacaaatagctgagaaaagaaaagacacaaaaggcaaaggagaaaaggaaagatataaccattaaatgcagagttgcaaagaacagcaaggagagataagaaagccttcctcagtgatcaatgcaaagaaatagaggaaaacaatagaatgggaaagactagagatctcttcaagaaaatcagagataccaagggaacatattttatgcaaaatggacacagtaaagaacagaaatggtatggccctaacagaagcagaagatattaagaagaggtggcaagaatacacagaagaactgtacaaaaaagatcttcacgacccagataatcacgatggtgagatcactcacctagagccagacatcctggaatgagaagtcaagtgggccttagaaagcatcactacgaacaaagctagtggaggtgatggaattccagctgagctatttcaaatcctgaaagatgatgctgtgaaagtgctgcactcaatatgccagcaaattgggaaaactcagcagtggtcacaggactggaaaaggtcagttttcattccagtcccaaagaaaggcaatgacagagaatgctcaaactaccacaaaattgcactcatctgacacgctagtaaactaatgctcaaaattctccaagccaggcttcagcaacacatgaaccatgaacttacagatgttcaagctggatttagaaaaggcagaggcaccagagatcaaattgccaacatccactggagcactgaaaaagcgagagttccagaaaaacatttacttctcctttattgactatgccaaagcctttgactgtgtggatcacaaccaactgtggaaaattctgaaagagatgggaataccagaccatctgacctgcctcctgagaaacctatacgcaggtcaggaagcaagttagaactggacatggtacaacagactggttccaaatcgggaaaaggagtacattaagtctgtgtattgtcaccctgcttatttaccttatatgcagagtacatcaatgagaaatgctgggctggatgaagtacaagctggaataaacactgccaggagaaatatcaataacctcagatatgcagatgacaccacccttatggcagaaagtgaaaaactaaagagcctcttgatgaaagtgaaagaggagagtgaaaaagttggcttaaagcacaacattcagaaaactaagatcatggcatctggtcccatcacttcatgggaaatagatggggaaacaatggaaacagtgagagactttattttcttgggctccaaaatcactgcagatggtgactgcagccatgaaattaaaagacgcttactccttggaaggaaagttatgaccaacccagacagcatattcaaaagcagagacattactttgccaccaaaggtccatgtagtcaaagctatggtttttccagtggtcatgtatggatgtgagaaccgaactataaagaaagctgagtgccaaagaattgatgcttttgaactgtggtgttggagaagattcttgagagtgccttggactgcaaggagatccaaccagtccatccaaaaggaaatcaaccctgaatagtcattggaaggattgatgttgacgctgaagctccaatactttggccacctgatgcaaagaactgactccttggataaagaccctgatgctggggaagactgaaggcagaaggagaagggggtgacagaggatgagatggttggatggcatctctgactcgatggacatgagtttgagcaagctccgggatttggtgatggacagggaggcctggtgtgctgcagtccatggggtcacaaagagtcggacacgactgagcgactgaactgaaccgacgcattcctcttgtgattttttaatttaaaaaaaaaagcactctacatggtgtctaagactggtgtttacaccaatcgtttcgatagcgtatttcaggctgctgccaaactcaggtatgaacagggcgcatctggacaagataagtccaggtctcactgggcacttctcatgcgaagaggagtccaggtctgatggacagtgaggtccttttccacagagacactgcctagtatcaatacttaaccacacgtgtcatctctggaagtttctttggtaaagcacaacaaagcctttatgaaaaccctatgaacatattcacacccactttgcaacaagcgcaaagttgagggaagacgtagcaccaaaagccccctgagggctgggagcttaggttggcttgggtcaacccccttcaccccacccagaaagctaagaaagtgccttgtcccgcgccaggaccgcagggcccccgacccccccagccccgcccagacccacatgaagcacacccaggcatagtggtatgcagtgcggcccatgcccacagctacccaggccagcaggctgcccccggtccacaaaccacatcagaaccagatggaccgcgaggcgacctgcccttcccaaactgcagagaaacgtgccacgtgcgtccctggtaacctcgagccacgctactcatggctaggatgagtaggaaggggatgactgcagggcgagctgcgtacactcactgatgtgtcacggggtctcagtgatcagataccctggctctccaccggacactgcccactgtctcagcccaggcaggccctccctggcggcggggggcccaccgggccaggggctgcggagggaaccctgaggcccagagacagccaacgggccagggcttctgtgcaaacccgatgggggggcctcagtcctctgttcgtttggggtaaaaagcgagccctgccctccacgggccaggccccctcccccggagccccacaggtccaccctgggcttggactctgcagctcccctcctcctgcaggactggagcacgtggacagtgctggcctgtcccctgcctgccgcacagctcacggctgggcacctggggagctcccgaccagcgtgctccctaaccactgtggaggtgcgcagggagccagccgctgctcgggctcagagccctgcctgggagtgagcacacgtcctcctggctaagtgccaggaaccccggggtccccagctttctgccatgtgacctagcaaggcctgagcatgagtgtccgccccgggggccacagccctgagtccgtcacagacacacagctcccgcagacacagactctgtccccagggcccagagaggacccccgggagcaaccgttgctgacacagtgtcctgaggctcactcgccccaaactgcctgtaaagatggagggaaggcggatcaccgtgggattagctgagcaagtgtgtcggctgctcagtcgggtcctactcttcacggccccatggactgcagtccgccaagctgctccatccatgggattctccaggcaagaatactggagtgggttgccatgtcctcctccaggggatcttcccgacccagggatcgaacccaggtctcctgcactgcaggctgactctttactgcctgagccaccagggagctaaatgcatagatagatgtaaattattcagaattagcagcggcaagtgtttgaaaataggtgcttcgagaaagacgcaggacgctgtgctgcactctgtcccctaaggggctgaaactctcccctagagccttggccttattactattgctaatgtgccagggctgctgttttagaagacagacagggcaagcgcgtctctactgagcttctccgcagcccacgcagcgcggggtggggcctcttttctgtcctggggacgcggggctgggggcggccctgctgattatcacgcagctcagggccacacggaaggtggctctaactcggtggccaggagctctgtcctccacgtcctcccctgccccagggtgggcacaagtgctgtgcatacagcgtgcccactttgcagatgagaaactgaggtcaggagagcctaaggaatctgtcatggagcccagggctgcaaaggagggagacacccactgagctgcagaaccaccagccacttgctcagagccagctccccacctccctgggttccacttccaccaggcccaggcctcctggggcaggtgcctggggtctctccttgcacagggccctgtttgactggcggcggcgtggctgatcgcagcaccagctccaggacggggcatggaggacaggcctgggggcggctggcccagatcgggacagacgcttctttctgtggagcctgcaggctctctaggtgagagccacggcccttctcagcacacgacgggggacagccacgcactcaaactggagggcagaagccacgctcacagattcaccggtaaagtgctgccagcctacgcagaaccccagccacgcacgcagacgtctctccgaccaggcaaggctctgtggaccccactgcccactggggtccagctctgggacagggcccctcctccgtgcacccaggatgcgggtcaagtcccctggcactgagcggaagcacctcctctgtgtccggctcctgtttggggctggtgaccccacgtcctccctggggtgcactgcctacacggggcccgcctgtgtccttaggatggggaggcaggggcccccagccctgctccctgtaccccaccactccggtggtgaagctgttccaaagcttctctgtccggaactgaccaaaatcctttgaatgaagacaaattcatgttcgtgaaaaagcagctgccgcacacccccactccatgaagcccggcatttccctcgagggccaggctacacctgccacctccgagagcagagccccgccctccacaaccaggagggcggccaggcttcccaggggcacagctttggggagaggcttgccttgctggctcctgccctcctgagcgccccagtgcaagacccagggctgcttcaatccttcttaaaagccactgcccgcttacagagtcactgctgggcagggtccaggggtcccgggcacttcgcttgtgtctaaacatccttcttctggcttgtgacagagcggccgacgtcgccctgaggaccccctggtgggccccccaatcccctgcccctacagtggccctgcacccacctgtctttctgaggggaaagtcatctttggcgtcgtacatgcccaggaccgggtggttgtaggaggccgacgccccgctctggggcggggagctctggtccagcgagctgtgctgcgtcttcctggagagaaagggggggacagaggctgagtgaccctcagggacctggagcccaggccgtgcaggaagagcacccctgggcgcccgcatggacggttctccctttgacgcgtgggcctggcttggtggccagcctgctgggcagcctggcttcctcctggggcaggactgaaatgatgatacaaggccacctgtgagcctgcgcacctggccacgtgcagccttccccaggcccgaggggctgaggacggccggcccgaggggctgcacacgtggtccaatccctgggctctgcctggccccctcgctcttggggtctcctggcctggcaggcctcaggctgaggcgggtgttgcccccagccactgaggggcctggccccaggacgcaggagggagacagcgggctccaggtgcaaggaacgcagctgttgttggaggtggccgagacctggccggggcctgtagggacagtgctggtggcctctgggtcctggagggcagaggccacgtggggactgtccccctcccagggacggtcaccccggccatctcccctcccctggggaggcagggattggcggcaccctgggccccaggagctgatcctgggaaatttgcttcctctgtgagttggcggacacagccccaaacggaatgacaggcagggcgctgccagcggcggctcgaggggggctcaggcctcaggagggggtgttggccgcgctggtgatgaccgtccgcaaacgtgctgcgtctcgctggcaacactgaaggtgtaatgaattccaagagtctgtactcggtgtaatctgcttaatgacttgaaacaaattagccaacttacttatttggaatttgttagactatttatttgcatacacagcactccacgtccccacacacctggtgttgtttgaattgagaatgtgagcacttaaacgcttacaggtggatgtttaaatatttgagagcgcaaatgggtgtaaagcacacagtgatcacggagccggatccacaaatgcctgcaggcaggccacagcgggcgctcagatccctgggacaggcctgctgcccgcctgcacccccaccacccccaggacgcacgtcgggggccagggccgtgggctcagggctggactagccacgctcatgccgtctgcaccctcgctgcgtcggactgccaggcctcactcgggggtccagtctggcacaaccccacggaaggtctgagggcgtctctctacccgacttctccaggccacagcctccagggagcatggcctcggcagccccaaaccgtgccatcactgcgaggtctaagctgggagagagttcactttctccttcatgagaaacatggaaaagcccgtgtgtgtgttatgtaatctcaaaacatggataattacgattaatgaaacctcataggtaataataaccactgtcactagattccgatggtagactttgcaattaagccagaagtacgttccgtgcaagatctagcagactttctcctctgtcttgatctcttgagatgccatcagtactgaaaccctccctcccgtccagccctgacgtggaggagcacaggcggggttggcccccaagccgctgttctgcaccgtccaagagggcactcgggcctggggcagtggccaggctgacccagcggagccggacccccgccggtggccgcgaggatggaacctgacttctcagcagccaggcttccccaggcctccaaacaccacgcaaaacggaggaaaaccagctcattgctagaggccagggcctcccaggaagcagtagccgctggccctcctgtgggacccagccctcgtcacagagcccggggctcacacgcgccgcagcgggcgacggccgcgggtgtgagcgagggcaaggcccgtccttgtctgcaggggcacgtgaactctcacccaccctcacacgcaaccagtgcacaggcacacactcacacttacacagacacacacagacagacagacacacactacacagacacaccacacagaccacatacacagagaccacacacatacagacacagacacacagagatcacacacacagacacaccacacagaccacacacacacacagacacagacacaccacacacacatacacagacacagaccacacacacacacagacacacacacatcacacacccacacacagacacaaacacacagaccacacaaacacacacacagacacagacacacacaccacacaaacagatacacctcctgcacacaccacacacacacagacacagaccacacacacacagacacaccacacagaccacacactatacacacagatacatgtcatacacataccatacacacacagacacagacacacagaccacccacacacagacacaaacacacagacacacacacacacagacacacacacacacagacacagacacacagaccacacactatacacacagatacatgtcataaacataccatacacacagacacagacacacagaccacccacacaaagacacagacacaaagacacagacacacaccacacacacacacacatacacatacacacagacacagacacaccacacagaccacacactatacacacagatacatgttatacacataccatacacacacacagacatacagaccacccacacaaagacacagacacaaacacacagacatgcacacacacagacacacacacatacacatacacagacacacacacacagacacacaccacacacacacaaacacacagacacacacagacacacacacactatacccacacacaccacagaccacacacacacacacacaaagacacataccacacagagacacagacagacacacacagacacacacacactacacagacatacacatagacataccacatagaccacacacacagagaccacacacacacacaaaccacagacatagacacacatactacacacacagatacacctcacacacacagacacacacacagacacacacaaagacacataccacacagagacacagacagacagacagacagacacacacacacacacacacacacacactacacagacatacacatagacataccacacagatcacacacacagagaccacacacatacaccacacacacacataccacatagacacacatactacatacacagatacacctcacacagagaccacacacagacacacacacacacaaatagacacaccacacacacacacgcactctacatacagatacacctcacacacagaccacacacaccccttgcaccccaggggcagaacgtgaggagctgctcttctaactcagctccaacgagaatcgctgtccaggtgttcgacctgcccttccagctgggaggaagcgcctggagtagctctgctgtgatcctggctgacggaaggggcaccgcgtcttaaagaccatcggtcctcagtgaagaagatggaagacaaacatgcctgctttttctttctaaatattgctctgaccatgatacggaacaaagccgaacacaaactcagccatttaccaagtaatttagtaaatttagccatttaactaaattctaccaacaaccggcctttcccatgacctcaggtttatgcaggtgaataacatttgtaatcgctcacaccagcactgtccaacagaagtaatacaggctgcgtgtgcaatttaaaattctttcttggccacgtgagcaggaacaaaaagaaagcagtgaaattacgttcggtgttcttaatccaatacaccccaaatcctatcattgcaactaaaaagtattaaggagatagttctcatttttttcacatctggcgtgtctgatgttcacagcttgtctccatttgaacagtccattttgatgccccggagcccacgtggctggtggctaccatggcaggcagcacggtctcctccggtatgcctaaaactggcggttatgacccaggtacacggtagaaccatgccagtacagcacagagaacagtcacctccacgggaaggccctctgccccctccccggccactgccacttggcttcccgtccctacagaccggctgtgccgactctaggaccacatgcaaatggcatctgaaggcacagactctgcgtcttctccgaagcctgatgtttctaggtatgggcaggctgagcagatgagaaagcaggtgcccgtgttgccatcacctgctggcggacactcagctacttccatgctttggagacaatgagcagaattgctgtgaccgtcagaacacaagtcatgcccggatggaagacttcacctgctcttagggacacacctaggagaatgggtcatgggtcacggagtgggcatataggcaagaatcctggagtgggttgccatttcctcctccagggaatcttccggacccagggatagaacctgcatctcttgcatctcctggcaggtggattctttacggttgagccgcctggaaagctggcgctgggtttgttcagtttcagcccttcctgtgtgtgaggggtcgtctcgctgggcatttccagggtgactaatgatctttgtgaaattactgaccatttgcatcttattttgtgaggtaatcagttcagtcactcagtcgtgtccaactctttgcgacaccatggattgctgcacgccaggcttccctgtccatcaccaactcctggagcttgctcaaactcattgtgaggtattggctcatgtcttttgtctatattttttcagtagggtgcttgtctttttgttattgagttgtgaagtgaagtgttacttgctcagtcgtgtctgactctttgtgctcccaaggactgtagcctgccatgctcctctgtccatggaattttccaggcaagaatactggaatgggttgcccttcccttcaggggatcttcccaacccagggatcgaacctgggtctcctgcattgcaggcagattctctaccatctgagccgccagggaagctctttgaattgtaggacttccttatgtattttggatcaagggctcggctgctcacattcattgtgagtattttgtttctgtctgtgccttgcctttttattttcttaagggtgcctttcaaaggatgaaagtattaagttttgattaagtttacatttctggtttatagttgatgatttgggtgttcaaagatctccttgcttacctcttcaccaacgtcatgaaaactttctcctacattttcttctggaagttttaacaatgcagcttttatgttcaggcccatgacacctgagctgaccatcatgggtggagtgaagctggagtcaaggcgaggtttttctctataaagatgggtttttccatcttgccatcatgcaagtgaacatgacccacgatttgctttggtttgtgtgacaaatcaaggagcctaccaagtccaaggcaaacaggcccattccctctgactccacggaggtgagtccttccccgactgcagcgggcacggccccgtcccctgggaaagagggatctccccaccaagcactggaccggggcaagcaagcctcctccgaagctgggccaccctgcccaccagggagccatatccaaccctgtgggatcctgtccccaggcccagcctgcctgcccccgcctcccccttccagttcccaggggctccttgctgacccctccccagcagcccccagcactggaggtgacgcaaggtcccagcccgtggactccgtcctcctctttgcatgcaagtccatcaccatggcatctattcctggagactggacgccccacgtctccactcacgggggtcctgacaccccaatcttccctttgcatccctgtggccaccatccattgactccggcatggtcaaccatgaccctcctcccaccacaacctcctctgggcccaccgccttcctagcactgctcctgaagacccctgctgctctcagaacagggcctctgctgaaaagcttcctagcctgcagatcacatcacctgtcccaagggaggatccaggagcactgcccacctttacccaacaggctactcccgggggtcctggaccccccaaccccacccagcttctcttcctgccctgcccaacctactacagtgcagggcatttgcctggtagcccccccgcccccccacaaaggaggacaagagccttcccagcacaaaacccagggggtggtcactagtggggagacgacggatcagcgccgccacgtagtggggcccccaggagcacggccccagtgtccagcgcctggggcacgtggccgccatgcgcggctcttcgaggcggccgctgccgtcgcgcctgtggccgggtggtggcgctgctgagcccacagccggcgggtgcgggtgcagccggagcggtcgtgtgttgcgggggctgccgacactcagagtggagatggcttcagaaccaaaacgccctttaggccgaatctactgaaacaaacgcgttcatttttatgtgatctggcagcatgttagtaagactgctatccatctcggggctccaggaagagctatgctttccctccatgaacgaatgataatcccatttttacttaaaaaagctgccgatgaggcttcttccaggacagaatcacccttgaaaggagaagcaaacgatatcaaagcagaaaaaacccgtggggcaccccggactatggtctgaagccacagaactttgtcactgcacttccagcttggcctgggtcggtggccagcccctcagagccacacgcgggcccagaggaaaaacccaacacacgagcaatcccgccaccaagctcaagtcctctttgccaggctcatcggcctctgagcactgacaggcagtctgtggtctctgtcagctacgcaggctctgggaggttcttagcataaaaacaataaaaagaccacaggtgcttttgacttgaccagtaatcaataacatgttgggcagaaattcagtaggtgcatatggatgatttagaccagagttccggtttaacaggtgccttttgtggccaaaaattgcatgagagccaagactatggtcagacaccaccccacgagtttcccttcaacgtctgtttaaagagcagccctctctgcatctggacaacagctgtgtgccctgaccactgcaccactcgggtctgaccacgtctgctgctggctcagggagcatctaatcccacgccctcccggggggagaaccgagcgcccctccggtctcccacggaccccgtgtgcccggggccctccacgtacccgtaccagtagcgagggtcgctggacatgcagtggttcaggctccggtgagccagggccttctttttattgaggacaaactcctgcagcttcatcttcacttccgtgctggccacggcgcctggcgcgggagagagtgggggcgagtgactggaggctctagcccagggccccctgcaccgcatgccggaaaaggcaggacagtgatgggcaggggtggttcccgccgacaccagagagcatctcatgggaaagaggggagtcagggggttgaagggagagagcttcttcccaggaacattgcatataagtgcatttcatttaaagtgcagacggaatcagcacaaagacccagcgctacctaacacaaatcccctgcagaaggaagttctaatggtcttccataagaggagggcctgagttaggagtgcagctgtgtggtttctttctcatggcagcaaagcgaggccgagcctcagaagaggttttgtgccaactgaagaaccgtgtctgagacagggccgagagtgacagcgatgtagcccgcctcgcggggagtgggcaaggccagggcagcgggcagggcagccgggggcctggccaggtgtgccagagggacagtcctgctctttctagcctacagctacctcctgaggtaaggcgtgtttcatcaagtgggactaaagctgaaatcttgtgttttgtgcttttctggtggtggtggcggttgttcacagccctgttaaagaaaaccagcaaatcagggaaaagacactaataaaggccaaagccaccgccctgtctcaggggctgctggcatctgatctgtgctcctcagagctgcagtgagacaccagggcacgtgggatccgtccgtcagagatacggtgtcttgtccagagaatgcaaacagcattcgcaatggtgggaaaaggcttcatgaggtgagcaaagcccagttacgcattcgcagtggtgggaaaaggcctcatgaggtgggcaaagcccagttacagcattcacaatggtgggaaaaggcctcatgaggtgggcaaagcccagttaccgcattcgcaacggtgggaaaaggcctcacgatgtgggcaaagcccagttaccgcattcgcaacggtgggaaaaggcctcacgaggtgagcaaagcccacttcagaaaacccgttcccgactgggagacggtttcagacatttccttttgttgtttttgttagaaacgatgttggccaacatttatgagtaagtatcacccacccaccaccttccccagtggctcagacggtaaagactgcctgcagtgctaggacagacgcaggttcaatccctgggtcaggaagatcctctggagaaggaagcggcaacccactccagtcttctttatggagaatcccatggacagagcctgtcaggccacagttcacgggtcacgaagagtcggacgtgactgagcaactaacacttatcatctcccatatgtaggattattcccacagaagggatgagcaaagcagctgtgaacaacaaaacaacattataacccttgaagaatctaagctgttttccaaatttctctatacagtgaccaccacatgccacccactggccacagaccgggaggcaacgttcccctatcggtacttgagagtaccaactaacccgtgtttctgtctataatagtactcaagagtaccacctgactcttactctctatcagcactcaggagtactacctcaccttgtgcctctttcaggagttgggagtacgccctgaccttgagtatccatcagtactcagagtatcatatgacccttgtctcgatcagtacttgggagtaccccctgaccgtgtgtctccatcagtactccagcgtaccacctagtctttgtttctatctgtaacagtactgagcagtacgccctgaccttgagtatccatcagtactcagagtaccacgtgacccttgtctcgatcagtacttgggagtaccccctgaccgtgcatctctacagtactcagggagtaccatttgacccttttctaccagtacttcagggtatcacctgactctgagtctcattcagtactcaggagtgccacctgaccttgagtatccatcaatactaggcagtaccaactgttccttatctatcagtactcaggaataccacttggccttgtcgattagtactcacgtgtaccactcgaccccatgtctctataagagtactgaagagtaccccctgatccttgtctgtcaggattctgaagtaccactcaatcttgtctactagcatttatgagtactgcctgacccagcatctctacaacagtatttgagagtgccctgaccctttgtaacagtactcaggagtgccacctgctgcaaaggagaagaccgagcctcactgccaggtccttgatggccaccaggacgcactggtgtttctctctagggatgctcttcagtgaggcacttggctcaattttctcagagtcttcctgtggtgtgtgcggtggtgctgtgggtctgtgtgtacactttacatttgtatcctttagcgtgactttttttttttgcagtaatacacttattgtcagccatcacatgttaaggcatgtttaaacctcatcattaatgctgttcagttcagttcagtcgctcagtcgtgtccgactctgtgcgaccccatggactgcagcacgcaaggcctccctgtgtgtcaccaactcctggagttcactcaaactcatgtccattgagtcagtgatgccatccaaccatctcatcctctgtcatccccttctcctcccgccttcaatctttcccagcatcagggtctttaccaaggagtcagttcttcactttaggtggccaaagtatcagagcttcagcttcagtatcagtccttccaatgaatattcaggatttgtttcctttaggattgactggttgaatctccttgcagtccaagggactctcaagagtcttccccaacaccacagttcaaaagcagcaattcctcagcagtcagccttctttttatggtccagctctcacatccatacatgaccactggaaaaaccatagctttaactagatggacctttgtcggcaaagtaatgtctctgcttttcagtatgctgtctaggttgctcacagctttcctcccaaggagcaagcgtcttttaatttcatggctgcaggcaccatttgcagtgattttggagtgattaatgctgtaagtaggtgttaacatcaccacgaggtccggggggactcaggatgggcagtcccagcaaagtcgttctgatgttcagtctcatcagacccctggctcccagctccacactctgtggttcacatgaggttggccttgttctctcatttctctttaaagtgtggcttatattctgatgctgtgaggtgacagcaaatgcttgtctgccctcagtgcctggcacagagctcccgagaccctgtcacttccaagtaacgggagcatgaggagcgccctgagctctaatggggtgactctggggggccttccggtgggaggagggccaccagcaagacaagcctcaggagaagctcgcaattctcagctccacccgaatcctccagagaggagaggggctcgatggaggtggagctggtaactgatcacgctcacgtgaggaagcctgcacaaactgcaagtgtaggggctcggagagtgtccaggttggtgagcacatccacaccaggaggggggcccccaactccacataccaggggcttctgcactcggagcttttccacagcacctctgtatctgttcctgggcggctcatctttttgaaacacttggcttctttactctctcattggctgtgctgggtcttgggcgctgcccgacattcggcttctttattctcttgttggctgggctgggtcctgggcgctgcccgtgggcttcgtctagctgcggcaagcgggggctgctctccagtcgtgctgcgtggcttcacactgcggtggcttcacttgcagccgagcgcaggcttggtggtcgtggcccgcgggctcagctgctccgcggcttgtgcactctttccagacccgtgtcccctgcactggcaggcagactcctatccactggaccagcagggaagtccctcattttgttcgactcagcccttagcctgtgagatctgatgcttcctctggggagatagtatcagaactgagctaaactgcaggactgccccacccagtgctgcaggaattgcctcttgtggggaaatcctccacatgcctggtgaccagcagtgtcaggagtgaagtcctctgcgggaccggagtgtacacaagaccaaaggaaaagcgtgagaccaaagagctgcgctttcccaacactggaaagaaaagacttgttttttcctaactcaaatgttccagagcttgtctttatggagtttattctagttttctcactgtgatttttttgttgttgtttttcgatttcctggaagttttgaaattgatctttacactggttcgggaaaataatcagcttcattttatccttgtttttcttgtgttgagttttcataaataggttcacattaaaggcagcactccactgaggccatttcatgacagatttcagggtgccgtggatgagggtcaggcagaatgaaccccctgcgcacagaatcgcccacgctgcagcaggacctggatgagagccaccaggaaggcacaaggaaagtgcccgacaccgagtgcacggggaacagtccactggggttttggggcttttgcctcaggccttcttggtgtcctaggagacaacccaccatcgccggagcagcgaggctcgcccaggctccatgtgttaagtgcaagcgggtgagccagccgcctggcagagcggcccagaccgcattacagacccagcgagaccagcacaaaaggccaagggaatggtgatgcgaccaggtggtgggaagtgaccggaggtgtaaaatcacacctccgctttcgagcaaggctccctgggctccctccaaatgcagccagggctgggctcagaccattctgaacactttcagccgtctgtgtctgtctggtctgaaaaatcccactcacagaaatgctgaaatctgcatatcaggtgcccaacacgcagccccctggcattcctgatggcctctcagccccaggtggacactcgacagaatgcaaatgggagaccacagcaggacacaaggtcctgcaggatacccccaccaggggcagggccaggagaaacgggggccaagggagggtcttggtgtctggctgcagggccgggctggggcgaagtccactgggaggacgagcagcaggacaaccagagggcctgtccaaggagctgaccctcaggtccgtccaaaaggcccgaaggagtaaaccaagcagacgagaagcagggtcctcggggcacaggaccccactcactgggtgtcagctggcccaacttgcccaggaagccctgttaccatggacgcacttgccgctgcagagcgcacggcactggccacactgggaaagtgctggcctccccgcttagccacaacccaggctcgcaccacgggctcctgagctccgaggagcaacaagaacagatgtccggtgccagcagagggggcacacccaggataaacacagtgtcaggctgggcagcagggcccagacatgggcagaggcgcctgggccgtccagggagacgaccaccctggggggactgagggacctcggaggcgcccaccaggccgggacacggatggtattcccgttccctgagccgtctgcggggtcctcacagcaggaggtgcatctgacgggccctgggccaccgcagacacccgaggccctcgtccagctccagggtgggcgcgggcaccctgctgggctctcatggagacagagggaaacaaatgcaagtcgccaaaccctcacttccagtttccctgacaggagaggactcagagcggatgatgctggctctgctcctcgtcctctagttataccgccctcgcctctcaaaagacttctccaccttaagtgaaggctccagcagtgacaaaacaccttcagtaaatcagtccacgtcttggattttttagttaaattaatttctgctgacgatcactcactcattcatctgacagccttacggggaatatactatgtgccagcagtgaactagctggtggggacagaggtaagcaagacacagccagccttctgcccggagggtgttggggtagtcaggggacaagctttcaaggaaacccaggcagggaaggggctctgggtggggcctacctgctgggggcagaggccgggggctcagtggtccctgaagcaggtaccaccagacatgtctcccaggttagcgcccagggaaggaatgatcaccctacaaacgggcaaagaacgactctcacgggctggtgtcccatcttctagctccatctttttttttcccttttacacttttttcatatttttaaaattttatttatttggtcttagttgtggcatgtgggatctagtttcctgacctgggattgaacccaggccccctgcattgggcgtggggagtcttagccactggacctagccactagggaagtccctatctccacccttttgagccatttttaggcaaagctaacaacttctccaagtgagggcgccttcccccgccccccaggctgtggttgtaactaccagagaaaaatatgcacttgcgttagttccaaactgtccagaggacaaagacaggtcttctgttgaactttttgtttttaaatgaatttaaagacagtgtaccttagagtcttaaacatggttatattaaataaaacagatgaaagagcatgtgttcatgctgaataagatgaaaactgccatcaactctaagaattcactgttttaccaaatcaatagcattaactggtatcaatcaggaaaactgcagaataatttaaaagcaccatgaatgttaaatgtaacaaacctttcaatgaaatattcaaaaaaattcatcttttaaagaaccccaagaaatgacacaacagaagctctgcactacattttcaaatgcttacaaactggagatgctaacgccagggcctccgtgagccacacaaacaagaatctccttcataggtgaggcccgagcagcgtccaacatgcggcctgccaagcctgccttctctcaagaccacactctgagggctgcagggccgatgcaagcatgccaagtacccactgtacacagtcccttattaataataaacccgaccacccaaacccacgagctgaactgctggagctgctgctgcgatgagcctggagggaagcaaagaacattcctacagtctgtcaaggggctgcccggcaggcagaagaaattgtttttgactttgaacagattgaaactgttttcagaagtcaaatcttttcatattttgtgaggcctgagatgttatttttattggaagtttctggcagaccgggaggaagcactgtagaccaagctgcctttgagcgacctggtgagtccctgggtttgctggtgagccgggcacacaaacttgctgaccctcaccacctagccctctttcctcaaagaacaacctaccatcactgcaaagaagagcccccgtgggatcacgaggaggagctggcaggagcaggaaagggggcggggcaggagcagagggcggggcaggagaggggcggggcggagcagagggcggggcaggagagggggcggggcggagcagagggcggggcaggagtagaggatggggcaggaggggcgggggcggggcaggagagggggcggggcaggagcagagggcggggcagggagcagagggtgatgtgggagtagagggcggggcaggagcagagggcggggcaggagagggggcgggggcagagcagagggcggggcaggagtagaggatggggcaggaggggcgggggcggggcaggagagggggcggggcaggagcagagggcggggcagggagcagagggtgatgtgggagtagagggcggggcaggagagggggcggggccggaggaggtaccctcgaggaccaggtgggcaactctgggtgccacatgcctactgtctgacagcaaagcccctcacagggcgcctgtgggaccacatgctgttgtcggtggggtggggtctatggaaggcagcccccacgcggtggacacagtgggaggccacggagcctccaggatgctcaggcccctaactcagagcgagggcaaccaccccaaccccggttcgcagtctccaccgcaccttagagtcatcccggagtatcagaaatgaaagctggcgcccatcctccgccccagataagtccatcatgacagcctgtgtgcttgtggttcctggcatcagtgctgcaggctcaggagtgatcagcgcccagccataccctcagcacaagtggtggtgagtggcctgtggtgtagaccagcctcctggggtggttgagcctgttggtgtggaccagcctggcaggtggcagatggggggcatgggaggcagagggcagggaagtggggaccacgtgtgatgggcgccatctggcacagcagggccgcaatctgaattcacagaacaaggtgcaggtggctggccaagcctgcaagcccacttctcctgccagccttccaccctcatgtatgaagtctcggctgtgggctcccagggagtctgtttgtcgtcacccgcctcatcgctgtgctgtaatgagctatcccactcggatttaccgattcctgtcaaatactggcacacaagctagacttcatgtgggaaacaaactctgctgacctgctttctacactgaaattctattggacagtgaaagtgcaaatatgcttaaaatacatttattatttcaagagtgaatgctgtaataactgactggaaaagctgttaattttctgtataaaaacaatgactaagaatgtgcaaataaacagagacataaattgaatatgaagagactacattagttacatccttttaggaaaaataatatgctttatgaaagaaattatttataaaaatgtacaaaataatataggcataataatacagattagattccattttaatttagaaaagaccagtgtaatttaggctgcattagagctgagacttctgtggtttcaaaggcaccaccaggagagggacagggcaggtgaaggaagaccctcgcgacacctgtgaccgaccagagaacgggcaagagactggaacaaggaccccactggacaggacatccccatgggcaggagcctaggagaagatgctgggtcccgctatgatcagaggaagcagctgaagccagggggccgctgctcggagctgagatttaaagttaccgcagggatgcagggctataggacttctatgacgtcactgatgggggtgataagcagtccagctgctctggagactggcctcacctgtggaagctgacctgctccacaaggcgtggccgaaggtgtatggagcagcagcgtttgtaagagcccaggagcagcccaaacatccaccgactctcgaacggatggacacggctgcggggacctcagcaggaagcgaagccctcctgctacacaaggacatggcagacaccacatgcatagtgtggggtgaaaggagaaaagtacaagagcctacgacaccagcttccaaagcggtgctttgtgtcggagctgcagggctgaggggcggggcggcttctcctgaactggtcgcaggtgctgtgctaggggtagctgcacagtgagatgcacttgtgggtaattccctgcacacggaagtctgtgcgctactctctatgtacaacacacaccagtaagaagacttttaaaacaatttcaaataacagactttacaagaatcttcaagacatcttatgctgtatctcgtgtgtatataaactatgtatgtaaactttaaaagcttgttaaaatgacttgtacagatggctaaccactttcagtgtgtgcccgtgtgcatagtcgctgagtcatgtctgactctttgcaaccgtttggactatagcccgtcgggctcctctgtccatactggagtgggctgccatgccctcctctaggggattttccccacccaggaatcaaccgtcacctgcgtctcctgcagtgcaggtggattctgtacccgctgagccactgggggaacccaaccactttcagcaggtgaggataaaggagtttcaaggtttttggaggtcagtgtgtattgctaaagtgtgtaaagacttcttgttttacttatgggcatgagacgagtaaaccaccatctggtcaggacatcgaatcctgacacgggtagaagtgcacagcctgacatacttgccggattaacagggcacccatgcgtgcacctgagctctgaggtcttgggagaaaggaccagagcctgggaaagtctacctaatttccagagacaagcacacggaagagtctcctgtctaagatcaagttgggcaactcttgcaagataacggactctgctgggcttcacacaagcacagctaggatggaaagcaaacactggggtcaaagggcaaaaatgggcaacccaggagtcatcacgcctgctctaggtgacaggccatcctaccatctgccgctcagaaacgctctcagacaaagcaactttcaaaaagttgaggctgaactcataggtgaagctcactatgctgctttacgggtctgagtcatgtctcagtccgccaagagtctgcaaacgttcctgtaaatgcttaagacaaacccaaagtggggccagacgccctctgcagtcgctgcgtagagacaacgctggggaccagccctgaagctggggtgcccagaaacacgcgggcgaggtggctcgtgacgcggctcggctctggggcctgggtcccaggcgctcgtggctgaggggcagctggggagggcgcccgcccgcccgccgcccgccgcgcactcactctctttgcccttctccttgttcttcagctgctgcagcttctgctcccggtgccgcttctgcagctcctgctcctgtcggtgccgctcgagcttccgctggtgctcgagcagctcctgctggtgcttcatggccagcagctcctgctgttgctgtgggcgggaagcagcagacacaggtggtcagagcctcgccccgaaagcaacagtgagacagacacgcgcgaggagagcggcggggggccagggtcccctctctgccggtgtggcccccgggcctcgctcccctctgcagggcccacgtcgccaaggaggaagcggggctgctcgaggacggctcctacacctttcatgctgaaggctggaaatgagaataaaaacgactgacctcctggaagaaactatgcgtgccaatttatgcaatctaggaagtcgggagtcatgtacggatgtgagagttggaccgtaaggaaggctgagcaccaaagaattgatgcgtttgaactgtggtgctggagaagactcttgagagtcccttggactgcaaggaaatcaaaccagtccattctaaaggagatcaatcttgaatttcattggaaggactagtgctgaagctctaatacttaggccacctgaacagctgactcatgagaaaagaccctgatgctgggaaagattgaaagcaggaggagaaagggaccatagaggatgcgatggttagatggcgtcacggactcaatggacatgagtttgagcaagctccaggagatagtgagggacagggaagcctggtgtgctgcagtccatagggttgcggggctggacacgactgagcgactggaatgccttttcgagagtgacacaaaagagcatgaaagagcgtggtcactttgcaaaactgcttggcacattcttacaaagttaaacacacacccatccgagacccaggcatcccacacccagaactaacccaagagacatgggaatacatctgggcaaagccctgtgcaggaccgcgcatggccgctgtgcacacagcagccctgcctgacacacccctgacgtcctccggacgtgagcccagggacaggagtgcgtgttcttatgtgagaatcccacccggcgatgcgaaagaataaactggacatactggcaaaaacaaggatgggctataaaacaagcaaaatgaccaggtctggtgtcggctgtgggaacaggacagaaaagagtccacctgcagactctatttacacaaagttctggagcaggaaatcccaagacacggaggtaaaagtcagagaaggctgcttcttgggtgaggcagtagacaagctggggagctgcccggggtgtgcactgtctggtggaggtagcgtttacacagacacgcacgactgcccacggacacacactcaggatgtgtgtgttctgttccgtgtaagttagatcacgtttccaaaaatgatgtaactgacaatgtaagaagctaccttcacaatatatactgtcaacaaaattaaaatgcaaaaggtgaatgagaaaagctctttgccatacttatggtgcacagactaacttttatatgcagatggctgtttcacgttaataagaatatgataagcagctactaaaaagctgagcaaaaaaaggccaggagattcaccaaaaagagtttagttgctcagtcatgtccgactctttttgaccccatggactgcagtacgccaggcttctctgtccttcactatcttccagagtttgctcaaacttgtagattgagtcaatgataccatccaaccatctcatcctctgtcagccccttcttctcctgccttcaatctttcccagcgtcagagtcttttccaacgagtcagttcttcgcatcaggtggccaaagtactggagctttagcgtcagcatcagtccttccaatgaacactcaggactgatttcctttacgacggactggtttgacacttttgaactgtggttttgggacgactcttcagagtccgttggacagcaaggagatcaaactagtcaccaaaaaaaaaaaagagtggttaaaaataaatgggaaacagtgttcaacctcactagccatcaaatcccattttcacttagcgcgttggaaggggcaagaatggccaagcggccagcgctgatggggctgtgggagagacatgatcaagcccagacacctgacaggttttcccggaacatcaaccagccaagtcctctgctggcggccagagccgcctgctcccactggacagcccctccgactcatgctcccgccgtctgtccagccctgcccccgcctccccgctccagtgcttggccccccctgcacagcctcagcttcccaccagccacgtggggcctcgggaagccccgagggcctcccctgccaacctggccacccgcccagggcaggcctctgcccacagcacctccccggggggcacttgtgtcctggcagtgactcactcccgacccctctccttcggctggggtgggtctcgccctctccctgtcccatggcgggtgggggcgctgcagtctgtctcctgagaggccccaggactctccgtggacaagcacgcttccccccacgtcagccaccagaggagcgagtgtagacggcccccaggcggcagagcagcgagtgtagacggcccccaggcggcagagcagcgagtgtagatggcccccaggcggcagaggagtgagtgtagacggcccccaggcggcagaggagcgagtgtagacggcccccaggtggcagaggagcgagtgtagacggcccccaggcagcagagcagtgagtgtagacggcccccaggcagcagaggagtgagtgtagacggcccccaggcagcagcgcacctgcccccaactcagggcccggggctcccaggccatatcgtgcagcaggctgtgtggcgatgggcaggagcggacacccagctcagcgcccacccgtatgctccatacacgctgagcatcatggccgacctctctctatggcagaaataaaaacaaccgccttcccaacaagtggctgacaggagctggggcaggacgagggtggcagaggccgctctgggtgaccgggtttcaagagtagctctccaccctggctccccagctctgcagtgactgtcgcccgtggtcagcacatctgggtctgaccttcagcgcttccagctggcgttactgtgcctgtctgtaagaccagcttgagaactttgcaaatgatttaaaaaggggtgttttcttctcttctgaaaggaacacggaatgacaccactgggataaaagactaaatgaagtggaaaggagccacgtccctgttactagtttccttccaggaaggagggctgctcacccagggaggttcttctaccagagaaaatgtctgttgatctgcctggattcagaggatcctgccttggggcccaatggcactgtacctgatgtccaggggtacaggccctcatgggcatcaccaggccactgccagccactctgggattctaccagcatcgttggccttcggaaatggacacctcaaagggctgtctggtgttgggaagccaagacagtgcccggaacaacagatcttgggatgaagaacctggcgctcttggtattaccgatcccctcaaactgcctacacacagcccgggctccccttcaactgctcagcgttcatttaatgtgtaaatgaggcataggcagaaatctgctgaatctggtctcacaatatttacgtttcagccagaacccagaaaaggaaagtgagatctttcaattatcgttacaaagagactatggaaacaaccagcctagatcccggtgattaaaattcacaggacgacacaacttgcaaaaaatgactgttgcgccgttttagtgaaaggaacattaagaaaccaggcctccggcatccccagcatcatggcatgaaggagaaaggggcggcagaggatgagatggctggatggcgtcaccgactcgatggacacgaacttgggcaaagtctgggaggtggtgaaggacagggaggcctggcgtgctgtagtctgtggaattgcagagagtcggacacgactggccgactgaacacaggggtccagctcgttttctgcccctaagctctcgtgcccaaacaggagggatgtgccgtggtctctgcgtccagcccaggccccaggggaaagcagaggccgctggcggctgcctatctgctccaggccaagggcagctggaggctcacctggcccgtctcaggagggctcctggtcgcaggtggtgggcaccgcctgcccctgttgtgcctcatctgctgatggctcaggctggggagacccacacccgcacacaggacagcctgggtcggcagggccaggaccggagaggcaggccaggctccgtgggggctgagccgtcccccggggctaggagcaccaggggcccaggccacgcccgagctgagcaagtgggccggcgcggggccttcccggctcctctaagccactcgcaggactgtctcctggggaggtcccacctcaacacgcagtggacgcagcaggcggggagctggccgaggcctctcgaccctgcctccggctgacgtggtggctgctcttgccacccacttcctgagtcactgtgaaaataaacgcacggatttcaggtggcccctcaccacagaacgcacagtgctagcacagcctggcgtggccggggcagagcgggggtcaccctgggggcatggggctgccacggtgaaggccatgtccacctggggctggacccagaagctctgtgcatcaagccccgccaggcggcggtcatggagcttttccaagatggtcaaggagcttctaaggctcaggtggcccactttcggggagaagtccaggacagaccagtaacccctgggggccagagcaccagtctgatggagggggcctcctctaggcttctcatctccaggctcacgagctacttggccacggtggtcagggcccatgcgagactaaaatattcttgcctacggggtcctccgaaatggaaccatgtccatctttatctccctggatttactggctcaaatcaaaaaggcatcctcatttcagttaagttcaaaatcacccttccctccagcctcatggagcacagcagcagtaatcaagaggtcccggggacgtgtcactcaggttctccccagatcggacactcaaatgccacaaagggccagccatccacaggcgggtcagagagaggagggcctgcatcacagatgcttggcgccccggacgcacggacgccgtggacagggcaccactgtgagcggtgtggggagtggggcggtgacagcggcccgggggagcccgccaccccgaccagcccagccccactcccgggacacgccgcctcctctcaggtgggtgccctggagaccagcggagggtcgcctccccctgcagggcactccgacccctcctctctgcggggctcactgccacctggacacacttcccggggcggctcagggctgacgaagacccaggccgtgtcctctggcctctccctgccatccagcacacagcaggtctacgtgcgcccgtgagggtcccgggccggaccagcggcagcgtatttatcagcgagagccagtgaggagagatgagagacaggccgtggtgcaaggccacacgagagggttttctctgcagaacaatctatggctgccagctctggaaacacactcggcgctcctcctcctaccagctgggggtggcgcagggcagagcgcggcatggagcggccatccacgcccccagggcggcaggtgtcttcctagaaacacggagtgcaggctacgagccagccctgaccgtatgtgcgctcacggggtgccgacgggctcaggaatgacgcggcgctcgcggcagccacgcgccttcccgggcaccagggctacggccgccgaagcgtgtcctccaagctcattacaagttgcttcagacgaccgagaagctggggtccaggcagcactcagccacccggggcaggtaataaagacagtaaacaccgtggcctggctcccaggccagaaaagcaggctcctttcagttctatccacttccctgcaaggaaaagtgtcacgtgcttcacacacagctcctaaagctctcctgtccagagagacggtaccaaccacagcaggcttcacacacagctcctaaagctctcctgtccagagagacggtaccaaccacagcaggcttcacacacagctcctacagctctcctgtccagagagacggtaccaaccacagcaggcttcacacacagctcctacagctctcctgtccagggagacggtaccaaccacagcaggcttcacacacagctcctacagctctcctgtccagggagacggtaccaaccacagcagacttcacacatagctcctaaagctctcctgtccagagagacggtaccaaccacagcaggcttcacacacagctcctacagctctcctgtccagagagatggtaccaaccacagcaggcttcacacacagctcctacagctctcctgtccagggagacggtaccaaccacagcagacttcacacacagctcctaaagctctcctgtccagggagacggtaccaaccacagcaggcttctcatacacacaagctcagcctcactagtgaaaaaggatgtgcaaataaagagtggaaagcgcttttatttttcacttgttagataggagataccctgagacctggggagagaaaagccaagctggacacagcctcgcagagagcaggcacacttctggacggagacccgatgagaccaccaaaatgtgtaacacgcacaccatagcatatctttcataggaaggggtttattccgaggaaatctgcctaccggacagtgctgacagtctgggctacaagcaggaaccgcagaagaccagccccatcccccaggatcgcacctgtcagaccaaggcgtcaggatgggtctctaccctgcagtgtagatgggaggggaggtggcagtgtagacaggaggggaggctcagtgtagatggggaggggaggcggcagtgtagatggggaggggaggtggcagtgtagacaggtggggaggcggcagtatagatgggaggggaggctgcagtgtagatggggaggggaggctgcagtgtagatggggaggggagcctgcagtgtagacaggtggggaggcggcagtgtagataggaggggaggctgcagtgtagatggggaagggaggctgtagtgtagacaggaggagaggtggcagtgtagacggggaggggagcctgcagtgtagacgggaggggaggtggcagtgtagacggggatgggaggctgcagtgtagatgggaggggaggctcagtgtagatggggaagggaggctgtagtgtagatggggaggggagcctgcagtgtagacggggaggggagcctgcagtgtagatgggaggggagggggcagtgtaggtggggaggggaggctgcagtgtagacgggaggggaggcggcagtgtaggtggggaggggagcctgcagtgtagatggggaagggaggctgtagtgtagacgtgaggggaggcggcagtgtagacgggaggggaggcggcagtgtagacgggaggggaggcggcagtgtagatggggaggggaggccgcagtgtagatggggaggggagcctgcagtgtagatggggaagggaggctgtagtgtagatgtgaggggaggctgtagtgtagatgtgaggggaggcggcagtgtagatgggaggggaggcggcagtgtagacgggaggggaggcggcagtgtagatggggaggggaggccgcagtgtagatggggaggggaggccgcagtgtagacggggaggcggcagcactggggtcacggggtccagcttcggctctggtgtcacccacgccgggcatgtatgggctctaccagctcctgacggcgtcctcaggctcctgtccatccacggccagtgatcccatgaggtcctggggctggcaggacagaaccacctgtcaccctcctggaagcactctctgaagacccctgtctcctctctacgctggagccacagtcatcgagaaaatccacgagtaacgactagagactgacagaaggcaatggctgggctggaagctctatcagcaagtggaacaaaggctgctgagactgccgaggagagccccagagagggagtcctgggcccgctccggccaagctgtggacggagcccaggtgggctctcaggggtcggggggcagagcagggagggctgcttctgcttgctctcaccgcgctgagcttcagctgggaacatgagatagagggactccctcgataacatgcttagaaaatttaaaatgacacaccaaagcggcaaacccagagaacaccacatccgcccggtgatccgctcagcagtcccagcggatcaaagactttctggacataaacactcgctgacacccacactcacgactcccgagaccctgggccccactgaccacgctccaggacccccttccggggaggaaagaactaagtgtaggacagcacggggacaggctcctgagcggccacaaccagcaagcgtccagaagcagtgcgacgctgtgtcagaaccccagagagagcatccttacccaaggttaacaacttcagttaccttttaaacactctatgttagtcactcagtcgtgtccgactccttgcaaccccagggactgtagcccaccaggcttctctgtccatgggatcgtccaggcaagaatactggagtgggttgccatttccttctgcaggggatttttctgacccagggatcgaacccgggtctcccgcattgcaggcagattctttaccatctaagccccagggaagcctttttaaaaacaccgttccctttttaattataaaatcctattcaaattcactgatggtttaatgacactaatcagattgtgtgctcaagaaatctgtctgacaaacaccactgccaaatgtcaccaaaagatgatggcatgtgaagagagtggaaatcatcaaaacagaggccggctgatgggatgacggttacatagttttaaatggcttcagacaaatgatctctgctgtaaatggagaaagaaacaattaaagcgcagagaacacgtcaccttgaggtttgtgaattgtgtttctggggctcccatcctctctgcgggcttctggcctgatctgcgggcttctggcctgaaggtctggggggctggaggacccctggtggagggggtctgcctccaaagatgggggccctcgggtcaccgggaggctgggtaaaggactcggaagagacgggctgccctgacctttcaggcttctgagatgacatcaagatgcaggagtctgatggagaaagttcaagaagcctgctggtgaggagaggaaaccgcatcccaggagtgagcagtgcgagtgggcagggtgggctcttcagatggctttcgggattcacagaaaacaggaggctgcagcttcaaggacaaaacagatcgggcggcctgcgggcggcgctcgctggtaccaaacggcggttatctggactgactttggtgaggacctagtcccgcagccactgaccacatgtggccgcagtgcagctggtccacagggaaccgggctctacgtgtctggtccacagcgtgcacccagactcagcatggccacaaccgcttatgtggatcacgggttgaagcgacacttcagaaatacggggttaaataaagtagcctgaaattacttttacctttagcagccaggtccccagtggccccccaaagactccttcctgcctcctggtgtccaccccttggctgggcccctgccgggagggttgatgcctatgacagcagagcaacgtagcaggggtgggtgggggggtcaccttcaagatttgtccagaagacactgcgacctccttcttggtcccttggatcctggaggcccaggtgaggaggacttgaggcctcctgccccaaaccaggggggtgagtgagctgggaaggggatcctgcaggcctggccccatgctcaggtgagaccaccgccctgaccatgcccggccacacctcacgagaggcccggccatctgtgagctgctcccagatccctagcctgtgggagctgagctatctgataacacatgtttgttatttcaaatggctaaaaatcttttgagtaatttgttacatatcaataaatcactcacacagcctcgtttctttgggtgttttaaggtaactacaggaaatgtagaactacctctgaattttaacgtgtacacatttccactgaacagcaaggctctgcaagattctaagcacggtgacacacgtgatcacagacattataagtggtccctcaaccaagtgacatgacctctctgtgcctcactagtgcacgtttcttcctggaacgtttgcttttaaaatctgggatcagaaaaaaatgtatgtagacagtgagcttcccaggtggcctactggtaaagaacctgcctgccaaggcaggagacacgagagtcatgttttcagttcctgggtctggaagatccctgagaggagggcatggcaacccactccagtgttcttgcctggagagtcccacggacagaggagcctggcgggctgcagtctatagggttgcaaagaacatgactgaggtgacttagcacgcaccagacagtaaacaccaaaaagaaaaaattatgttagttttttccttacttatcccatctaaatcaaagtaaatattagctcgcccccccttgcctggaaaatctcatggatggaggagcttggtgggctgcagtccatggggtcgctaagagtcggacacgactgagtgacttcactttcacgcattggagaaggaaatggcaacccactccagtgttcttgcctggagaatcccagggatgggggagcctggtgggccgctgtctatggagtcgctcagagtcagacatgactgaagcgacttagcagcagcagcccccgcaattataaaaagtcagtgggaaaaaaggagagaagatggacaagtcccaagaagaaaataaagacaattcctaaacacctcacccagaggtgaccactgctaatattttggcgcttcttctggctggtaatgtcgctatttagggacatatgtttgtagatgaagtccagcgataagatttctcccctgctttaagcttctacagggtgaccttaaatgctgtttccactcttggccacaaccagcttccaagtgttgacacgcaggtatacaaggcccggtgaggaacatccccaggcatcaacctcagcctggcagcagatcactgaggatgtcctgggaggcaagacagagcgccaggcagggcgggccagcctgggggctggggggggtggtcctgggcagcgggattgtgggcacacacactgggccggcctgtgggcttggagtttgtcctgggctgtggaattgtgggtatacacagggggccagtccagggcagtccaggggctcggggatggtcctgggtggcaagatcttggggcacacagagcggaccggcccaggagccactggggaggtcctgggcagcgggatctgggcgcgcatggcgggccggcccaggggccaccgggcaggtcccgggtggtggggtctgggcgcgagtggcaggccagccctggggccaccgggcaggtcctgggcggcggggtctgggtgcacatggcaggccggcccagggcctgaggccggggactgaccttgatgtgctcgtgcagctgggcctcgtgctgccgcgacagctgctcgtgctgcctctggaactcggcgatgaggatctgtctctgcagctgctgcttctgcttgagcgccaggagctcctgctgcagctgctgctcgcggaggcctggctccgccacgggcagcgggaactggtggtccaggcgcaggtccatgggcacccccgggggggccaccggcagaggcagggccgaggccacgtccactgcggagagagcacagaacagaggcgccggtgaccgggtggcccgccatcctggcccggccccagccatcctccctgggagcccacgctgccacggggacgcccacgccgccgccacggggacgctcatgcagtgagagccactgctcacttcagatgcctcctcccacctcctactcaacaggctcaataggcaggactcgggccttccaccctctccctccgaggcgcccacccctcaggcagaaaccagcgggaggtcggacggggatacacactaaaataggctctcctgcctctgccctgccctgcaccaagaggccctgctcactcaagggacctgggtgcaggcctgtggccttttctgatgccgtttttgaaagctgacactggctgccctcaggcagaggggcgagcggcgtgcttttctcctttgcaagaagccacagaagagttgtgtgaagggcccatggaacagcgtgtgccctcgaagtggtccagacaggcgcgccaggtgcgccgcgcgttgcagtggtgatgggcgcgccctctgggagacagccagtgcaaggctcccccggatcgcctgcttggctcatgctgcagggggacagcttctgtgctttgctaagaaacaaacggccttcaccgcacggaggcgtggcccacgaacagccatgagttgcctctgattagaaacggaagcagaactgatctaaacgcttgtagatcaacgccaaattaaaagcgaagaggaggcagaaaccaggtctccaattacaggtctcacaaaatacccccaagtgggcgctcctctcaggatgggattatatcagaaaagctgggccactggctgtgggcctccgacttcccagagaggctctggggccgcctccctgagggtctctgtcagagacaccccccgacccccagaagtggagacagcccagcagaggccccggggccccgcctcgaccagaaaggccgctcacaacctgcccagccacaggcctgagggccggaggctgggcctctcctccgggggctcagaggtctagaggagaccccgctcagcagacaggggccccaggccagtctcccctccagagtcatcgccacccaggagggggcctcgttgcagcatctctgcccaggctctctgcagtcaggcattctgatgccctggacccggtcccagggcctccctgggtgagaccggatctaacccagggcctctggaagtgccctccagccctgaccgcccctgccactggggccagtgaggggcttacaaaaggtaggtagtatggccattcataaattctctgtgcttattttcttaagctaaaatactgcttcttgatgaggtaagtggactgtcagagacacagcaggccggccccactttggttccggtggaaaatgacccaggagtggccacccctcgggatagcccatttcagcggtcaccacacaggcaggcccctgccggctgtcctgctgatgagtgaagtgaggtgggaaggcctggctccagctcagtcctgggtcctaacccccgagcccacaccgggggccctggtgtcctggaccaacacgcggcctcgcacctgcaggcttgctcacctgggcagggcgtggggcgctccccgggacagcaggggcctggctccagggctgcagtcaccacctccccctccccgccgccagaactaagcctggattccatccgaggcccccagagcccggggcaggttgcatgcatggaacgcctgggccctggcccctgggaatggagggaaaccctcaacattctatcatttttcagaaaacatctaattctcctctctctgacgtcctaacaagccttaggtaaataccagctcttcgatttttcccaaaatcagtgaggtgcaaactccgttttaaatgtatttgtttttttctagttgggtgtcaggcttgatgtgtgaagggctttttattttatatttatgcgacagaaacggacacaagtgactgttcgcgtgaataggcccagacgatagcggcgccccatcccgcccccaccacacacagctggcagagatggggctttactgacttcattttctttctttgatcatttttatcatgaaacatagcaggatggaaaaactgtgtaaacaacaccagttttataaaccctcagtatttccctccatttgcttcagactctattttaaggaatagaatattatggaagacagggagcagagagcagggagcagggctcaggaaacggactcagaggaaagggaaagtgacttgatgtcttaaaggaaattctgctttcctttctcccgggggtggggaagggctgcgtgttttcctgctttcactaatgacggtgctcagtgctgcctggaaaacatcacgcctgtgtatgacggcaggcttgctggctcttctttctgcttccctggaagaggatgagaagtttttcttcattaaccggttaacctgcctagttctttcatggattaacaggtgagttacttagcagatcccctcaggttagctggcccttgctttgcaaagataaagctgactttgtcttcctgggttacagacacacacacagaatcactgacagattgagcctgcagccgtttattgggcacatctgggtccacgttcatatgtgtggactggcttgcagtgtctctgacactcttcttatctggtcagggaacaatattttagctcaagaagccacagagaattaacgaaataaccgtattgcctgccttttgtaaggaggatcacctcatttgccttgatggcaggggtggtcagggggtggcccccttaggtgacatgtgaaggtgacctgagatgttatacaggaacaaggtcaagcctgagacgctgcacagaagacacccacgcactgttcgctcactgcgtcacgttgctgctgttagtcatgcagtcccatccagcctgtgaccccatgggctgtggcccgccaagctcctctgtccgtgggattcttcaggcaggagcgctggagcggggttccaggctcctctgtccgtgggattcttcaggcaggagcgctggagcggggtgccaggcccccctccaggggatctctccgacccagggttggaactcgcgttgcattggcaggtggatctttactgtcggaaccaccagggaggcgctcactgcaccataccatctccccatttctaatttttcacaggcgaggtcaaaaagatgatcagaaatgtccaatagttagcatcttaaaaagctgaacataaaacaactttgagggatctgttttattaacttcaaaaataggacgggccaagtgtttcctacgcctgcacccctcactgcagaaaaacgccagggcctccttctctgtgctgcgtgctggggggttgttcccagtccagcctgcagtgggtctgctgtgcaaagggacaggagagggcagagggcttgagggacgccctggggaagggcccacacgggggccgcagctctgagtgggaaggggcaggtgagccaggtcccagacagccagtgttaagagggcgggcgtgggggcggagacacaggaggccctggactgctcgcttggggcgcagggcctgcatccgcagatcctggggggccctgcaggcccaggtgggggtgccagcggcagggggaggccgggcctcagatgcagaggggctggcatcggggcactgggcgggagacgagggggcggggccgagggcgggaagggagggcgtggcaggcgccccggcgtggagggggtggggaggtccgaggttccctgcgtgcactgccccttcccttgggttccctttgagtctggagcgcagggaacataaggaggaaacacaccccacccctccagtcattccagacaccagagcaggtggcccgggggggggacggcaaggagacccccgggcaacaccatcctgcccgcagagaagagaggggcaccaggccagggcgcggggtggtcacgggcggtcctcaccgtttactgtgagaaagggaggagaggcctgttggaatttccccttttgaggtttcacataagacttcatcctctgctaaagaaagtccaacgcaaagagagaaggcaaagccagacgtcagctctgtcggacaagccgtgcccagcgccggccattccggcacctcgggagacggccctgcggacaggcacatgcgccagccctggcgtggccgcgggtccacggacccaggccaggcgcttctcccgcctgagcgcagcctcgggaggccaggcgggccccccaggcggctggagccccagctgagggatcagacccacagtccccattcattccgctgctggagggtgcgtcagacatgcccgcgactatttctgtatcaaaaactcgccgaaatgccacgagttcccaacagaagctgctggtgcttttgacccaaagctccccgaagaaaacaatgagactttctctacttaaagaatgtggcatcaaaacaaaaaagcctgtattctcatgaatattttatggcagagtagaaaattgcttttataggttgtgccttgagaaacatattaatacaatcagactcatgacgttagtaaaagcacaaagactatattcagagtttcaataagaaatggcaaggctgggccgtgacctataagttctcaatcagaaatagaaaagaaatctgctagtctctaatttttttaaaaaaataaatgatcggggggggaaaaaaaggacactgtaattttccattacatgggttggttcttctgttcataacactatttcctgtcatcacatagacagcaaacaaagagaaggtctattctttagaaagcagggccagagtgtaggctctgttcaagtaaagaacggctcattcagatctaggggacaataatagatgcttcatccgtgtcagcacgagttccgctcacactgacgtttgcctgcctgtgtgaggggaggagagagacgcctgcgggggggaggaggaggaaaaaggacgggggtctatcaaaaacgcataacctatctcaaaacgttttcaacgtttacgacaacacgcgtcacagcccgggggacgctggcgcacgcccgcctcgctccccaggcccccagccccgtgctgactccgctctgcgaccccgcgtgttgtgatcacaatttccaggacacacccctaaacacgcgtcctctgcactcagcagctgtgggtgggggaggcgagacgaaggcccccagggaaagacaagagtctcggggccaggctgcttcagcttctaggacagctgacaggaagagctcctccgggcaaggccaagagtgaccccgggaaaaccatgggccaccccccgcagtgggaccaacattgggactagaaccgccctgcctcctgctgctgcctgagcctgctgtcttccaggtgcgccctccaggtgcggggcccaggagccccgtggagaagcatggcctcatgtgagtgagggctggaggcagggaggtccagacgccctggaggctgcagagctcttgcacagcgcctcccgcacagctgcgccctccccgaggctggccccaggcctcccagggctgcccagggccgccgtttgtgctcaagcccttgtccagggatcgtgcctctgcctgcgcacagaactccagtgagcagtcacctcctccaggatggtggagacaacatccctacctccttgttcccaagactgttactgagaagctgtgactctggacgcgtgccctttgctctccctctggcagaccagctcctgcctgccgcgttcttagcaggaggctctggaagcgagggtcttccctcacccgccgcggagctccacaccacctgtccagtttggcagctcacgccccagtcgtggggaatctccctgggtcatcgtgcagaccatcgccctttcctcctgtttcccctttgggaacttccagtacctggtggtaaatctgcaacaacctgattttctttctgcttctcccacattttctgtgtctaatgctcagctctcttcgagattcccttaaatgtattttctaagtttctcactgggttttgcatactttctgtggctgtgtccctgaggacgaatggaggcaaggatcctaagctgtgagtggagaggggactcaaggctgagcttcgctaggtggtgcatggagctggcgtccattaggacacgccaggcacccatggttggggtctgaggcacccggagctgcagggcaggaggctgtggcggtgggggggtgactgtgcctgctgccctccagcctccactccactccgcccagccccctcctgcccgggtcctgccctggaggcgggacgtggggctgctttccaaggatgccgtggcgtccacccgctgggatcttggctgcacccaagggcggcgtggagtctggccaaatccagtgtgacctgtgacttcaatctccaccttccagacggctgctgaagctgcttccttttctgttccccgccctgtgttttttgaatgccccttacaggtctcgctgccctgggtcttagcagcagcacgtggggtctttgatcttcactggggcggcggggatctggatccctggccagggattgagcccaggccccctgcattgggagcacggagtctcagccactgggccaccagggaaggccctgttcccccatctctgggctgacgacctttctctgcaatacagatatagatagatcattgtttagggaaaattaaaaaaaaaaacacacacaaagccagcaataatggtataatcacctcccaaggatccgtgagccagctccaacaactgcttccctgtggccagcctttccttccacaccagcccactgcccttccttctagattatcctgctgccgacctgccagcagagcactttacccataaggactgtggtatctctaaataaactcttaagaaaacagtcaacctacccaaataagttaacaactccatgatgctatcaaatagccagaaagtattatcatttttttttaagagtctcatacacgtttctgagactttattcaactcaagattcaactggggacttccctgctggtccagtggttaagaatctgccttgcaatgcagaggatgtgggtttgatccttggtcaagagaactaagatcccacaggccatgggacaactaagccctcgagcctcagcgcgagcatctgctgaaagaaaacgtggtggcgcgaagatcctgtgtagccaggagcaaatgaagccccagctgaggcccacacacggcagccggccggcgcggctgtgcactctctccaacctacagatgccctgtcttctcctgcacgcccacgccctctccagccgacgggccgaagactctggtcacccgtcccgcgctgactgcccctgaggtgcagagccacacgacggagtccctgggagcaggaatgggtctggagtcccgggggacgcagctccgattcccagcagggccgccgcccccagagggtctggtgtcccccgggctcctgtgtcgccagcagctaaggtgttccccgatgatgccgtcgggcctgtcaacacggcccttctagccccgtctgccggtcctgagctgctggccggtgtgaaagggctccaagtcaagtgtcacattacccccacagacagcttttagcagagaggcagggccagtccttgacgaccttttatttgccaattttcaacaatactgagctggccgtgccgggtctggcttcgggatcgcagtgacccgagcctctgcagtcctgtcctgacgccctcacacgtcctcgggcagcctgcgtgacggcaccaggtcacccagaacccaccagcggccctggggacagccctcagtgtggctgtgacagctgtcccgaaatgcccctgcacctcccggtccccaggagggaccagcgatgtccccaaggacacctgggctccttcagtgggaaacacggagaccacagtctgggttttggctgccatagtttataatgtgtatatccttactggagcttttgtgaatttcaggagtgagtgaaattagatctgtgcgttcgatctgtcatctcaccatggaacttggggtgcataacttattagaaatatcattcaaaacagctgaacagtcataatcaagttccattcaacatactgatttatatgcagtatcattttccccaaaggtgctcttaactgaattacaattattctatttaatactgtgtgtgtgtataaaggggaaatgaggtagagaagtcagaagtgctttttaatgtaaaaatttaaaaatattctgtagggaaggtaaataagacaagtggtcccatctcagcttctcatgtagacgagtatggctctccctgcttttttgcctcattcagatgtatgtacacaggcgacgccaaagaaatgagcttatgtgagcaactcagaatatagattatgcttgaaaaataaaaataaataacaaacagtatggagcaagaacacactattatgttttatattgttttgttttcagctgagatcagaatgtaaagaaataaacatatatagtggtatttatacacgtatatccagagacctaggttcgatccttgggtcaggaagatcccctggagaagggcatagcaccccattccagtagtcttgcctggagaatcccatggacagaggagcctggtgggctacattccatgcggtcacacagagtcagacaggactgagtgactcacactttacccatgtgttacatgggaaggctctttgcacctggcctggggcggggagagacgcgacgcgcggcgcctctgagccgctttctgcacatgggcgccttgcacacacctgtccatcacgagggagcagcatgcaccttcaggccctggccggcccgggctctgcctccagacgagaaggcagtgggctacccttcagaagcaagcagagacaggtgggagcagggcaagtgcctcaagctgaaggcaggggaaggcgtcaggggcagacgtggcaatcccccaggtcggccctgagtcgctgcagaccacaggtctgcagggtgctggcctgggctagcttcacatgtcaacagggaccctgcaggacacgggtggatgccagcgtcatccccactgacaggcagggaacaagctcagagagtctaagtgacgtgcccgaggctacacagcaagtctcactggcaaactcagaactggacactaaccaggggcgacgggatgcccgcgggcgacagagcaggaagagccgggaggagggggcccgcaggccacccgggggtgttctcaggcggggcggcacaggccaccctggggtgggactctggttctcaggctggacggcagaggccaccctggggtgggactctggttctcaggaggggcggcagaggccaccctgggggtgttctcaggcggggtggcacaggccacctgggggtgttctcaggaggggtggcacaggccacctgggggtgttctcaggcagggtggcacaggtcaccggcgggtgttctcaggcggggtggcacaggtcaccggggggtgttctcaggcggggtggcacaggtcaccctggggtgggactctggttctcaggcggggtggcacaggtcaccctgggtgggactgtggttctcaggtggggtggtcagcagcttgtggacttgggagccacagaggctgggccctgctcagctgctgtgctcagggtgcctggggctccagcagcgcttgggtgatcaggccccctgcagcctgagcatgcatgctctggggctctgagagcactccctgccaccagggccggcggaccccttaggtccctgcccacggctccagctgtggattctgtcctgaccaagggctgggcatccccccaggatcgccagctggctccagcaccccgcaggcccgtgctttccagccaagaaaagcctctacttttcctgaaaggttcacaggggtccgctccgagagcccctgctcatggccgagacacagccccaagggtgcagccagctcgggtccgcaccacccaaccagtcccggaaaacaggctaaacagcaccaccgagcaaacccggctgccgagcagagacgcaaacagcaagttcctgacagctcactttcgctgccaaaaacaacaaggcaccataataccaggtaatgttttactccactgtctcttccccaaagctgggtttcacttccactcactcacacctcttccctaagcgccaagttttcaacgagcttctccctgacggagagcctaaggccatcagcacaccaaggcctggccacccctcacccagcaccgtgagggcctctcctgcagctgccgtgaccctcctcttcaaggtccctgctgcgcctgcatgtctgtggacaccagcgaggacccggtcgggggccagcaggtggggggtgggaccactcgtggagagcaggcccagggccccacttccaggcaccagggcgggcgtccaggtaatgctgctgagagagaagaagctgggcccctggcacaggcacctggtctcaaacgtccagtgtggggtcggggctaatgtgagttcaaatccccctgagggccagcggccacccaggggccctgcacgtgaccagcgttcatcgagagtcaggacacagcctcgagccaggatcccatggcagggaggtgtgaatgcagggagaagactccaggggagctgacctggctggaggggtatctgggcgccgcgggctgagctgagcctgtcttgcctcccgagctgctgaacgccctgcccctaaagtgggcccagcaggcgactttactgagggtggtgaagacccaaggcaagacctggtggtcaggatgcaggagacccccagaagggcacgagctggccctcagcgtctgcacatgtgacaactgaaggccgagtcatgaacgcacctggggacaagcgtccacagcacccaggctcaggttccagcacaccaggggtggaggccccggagagcaggcctgcagtgcaagtgaggggccccaggtcccctagacgtggagacacgccggcttcacaaggaacgagagggcgtgtatttgatgcagacagaggacaagctccggcctcatctcctcagggcggggtgccgatccgtggcagctgctgcggagtgtaggtcagggccccctccgcccccttctctccttttgtcaaagaaagaaaaaggcctttgtaggacgggagcatgcaggggagagaacgcagacaatgaggcagaatccaggccatctcactgttctgcaaaagcagaccatcgaggccctcccactcccttctcacccaccccacctgctccatcccctggcccgggcccctgggcacctgcagcggggcagccccacctccagcagggagggtgcagcctgtgtttcaggcccggcggtgggttccaaagtgtgggccccctcctccccgcagagaaggtcggaggtcagaggcagcacctaagacagacggctgagcatttccacaactggtgggagacacggaagccacaaccaagcagggaccccagcaaatggcagcggccgagacaatctccaagcggaactgcaggctcgggagaagagggtcagcgggcctcgaggacgagcaagctgcagacaaggggcgcgcggaaacggccagagaacccgagccaccccgcgggcagagggacaggtaccaagccagagccacgtgctggggaacagcggtcaagactgcatgcagaacacacacagacgggccacaccagaccgagaaggctgcaggcgcgccaacgagccctcagggaaggacgagcccactgcgagtctgagacgcgggaggagcagcgagcagagaatcccacacacacgaaaacgagtccacacggacagcaaggaggcggatggcagtgcccgacttgtggatggcgtcacagaggaagccctgagggccgctggggaggcgggagcgtcccagggccctgggacccctgccccccataggggtggaggtaggagacagaggttcacaggctgccacacagacctgctggagaccaagaggagggccctcagggtagtggcgggggtgtggctaggtcagtaaaatgattttaaggagaaagaaaaacacatgtggctgctaagcgcccccagctacacacacagatctggtctcccaatggacgcacacaactgcacctagagtccggccagaaataatcacaactgactctgatcaaacctccaggtctaaccaccgacggacaggaaactcaggcaagagaggtccgctctgaatccaagtcagggaggaaatcaagcgaaatctagaacccagggagacgctgcaggacagacaacccagtatcttcagagatagactgcaaagctcacaaaaagggaggaggaatcttacagatgagctggggacagaccagccaccacgcacaaacattcagtggacctcgtgtcaaacaatgaattacagagacacctgctttaaacaccgtcagggtgaagggataaagaagttaagtgaaggtcgctgagtcgtgtctggctctttgtgacctcacacactatgcagcccatggaattctccaggccagaataccggactggagagctgttcccttctccagcggattttcccaatccaggggtcgaacccgggtctcccgcatcacaggtggattcttcaccagctgagccacaagggaaacccaagaagactggagtgggtagcctatcccttctccagcggatcttcccgacccaggagttgaagcggggtctcctgcattgcaggtggattctttaccaactgagctatcagggaaaccaggatagctgtgaagccgcaacggggtgaagaggacgcggtatataaatacaatggaacttcagccatagggaagaagaaaatcttgtccttggtgaaaacatggatgaacctagaggatattatactaagtaaaataagtcaggtggagaaaggcaaataccacatgagctcacatatgtgaactcttaaaggaaaaacatgaacaaacctaacagaaagagaccaactggtgggtgcgagcggggacggaggctggagtgtgagcgagacaggtgagggggatgggagatccagactcgcagatcagcaagtcggccacggggcgtgacgtcggccgcaggcagcacaggaggtccccacacgaacaagtcccgttcccagcgtgtgttcgtgaagtccagctggtgcacagggtgagccacgtgagcctgggtccccgactaacacaaccagctccacagtgctgcgctgttacagctttatgacacttcccactcataacacaggtaaaaacaaacaagccatcttccactttacagttcagcaccttgaaaggtacactagtccaacacaatagctggcacacagggcctggcaggacaagaacagctaagaagagttactgacgggaggaaagagagcaggggagatgctagagccgaaggggcaccagcaacagcagacggagggcgagctgctgtctcagccacgcctgacgctgacgcaaagcaggtgtgcacctccgaaaggtcgcaacttgaaggtctgtatgtaggggactgactgtatctttctatggtgacaagtggtaactagacttatcatgatgacattttttaatgtacagaagcagggaattactgtgttgtgtaccaacacaggtttgtagatcacgtctacttaaattaacacatacacacaaacttgtatcaggaacatataaacactaggtgaacattgaataaagctaaagaattgttcagttcacttcattaactcagtcgtgtctgactctttgcaaccccatggactgcagcacgccaggcttccctgtctatcaccaactcctggaatttactcaatgtccattgagtcactgatgccatccaaccatctcatcctctgttgtccccttctcctcccacctacagtctttcccagcatcaggggcttttccaatgagtcagctcttcgcatcaggtggccaaagtattggaggttcagcttcagcatcagtccttccaatgaacacccaggactgatctcatttaggatggactggttggatctccttgcagtccaagggactctcaagagtcttctccaacaccacagtttaaaagcatcaattctttggaactcagctttcttcacacatccatctccatccgactctcacatccatacatgaccactggaaaaaccatagccttgaccacatatgttggcaaagtaatgtctctgctttttaatatgctgtcgaggttggtcataattttccttccaaggagtaagcgtcttttaatttcatggctgcaatgaccatctgcagtgactttggagcccaaaaacataaagtctgacactgtttccactgtttcctcatctatttcccatgaagtgatgggaccaggtgccatgatcttgcttttctgaatgttgagttttaagccaactttttctctctcctctttcactttcatcaagaggctctttagttcttcttcactttctgccataacagtggtgttatctgcatatctgagttattaatatttctcccagcaatcttgattccagcttgtgcttcacccagcccagtattttgcatgatgtgctctgcatataggttaaataagcagggtgacaatacagagccttgacgcactccttttcctgtttggaaccaatctgttgttccatgtccagttctaactgttgcttcctgacctgcatacagatttctcaagaggcaggtcaggtgatctggtattcccatctctttcagaatttcccacagtttattgtgatccacacagtcaaaggctttggcatagtcaataaaggagaaatagatgtttttctggaactcacttgctttttcgataatgcaatggatgttggcaatttgatctctggttcctctgccttttctaaatccagcttgaacatcagggagttcacggttcacgtattgctgaagcctggcttggagaattttgagaattactttactaccatgtgagatgagtgcaattgtgcggtagtttgagcattatttggcattgactttctttaggattggaatgaaaacggaccttttccagtcctgtggccactgctgagttttccaaatttgctggcatattgagcatagcactttcacggcgtcagctttcaggatttgaaatagatcaactggaattgcatcacctccactagctttgttcatagtgatgcttcataaggcccacttgacttcacattccaggatgtctggctctagattagtgatcacatcatcatgattatctgggtcgtgaagatcttttttgtacagttcttctgtgtattcttgccacctcttcctaatatcttctgcttctgttaggtccataccatttctgtcctttatcgagcccatctttgcatgaaatgttcccttggtatctctaattttcttgaagagatctcttagtctttcccattctgttttcctctacttctttgcattgatcgctaagaaaggctttcttatctctccttgctattctttggaactctccattcagatgcttatatctttccttttctctttttctttcacttctcttcttttctgagctatttgtgaggcctccccagacagccattttgccttttttcagttctttttcttggggatggttttgatcctggtctcctgtacaatgtcacaaacctccgtccatatttcttcaggcactctatcagatctaaccccttgaatctatttgtcacttccactgcataatcattagggatttgatttaggtcatacctgaatggtctagtggttttccctactttcttcaatttaagtctgaatttggtaataaggagttcataatctgagccacagtcagctcctggtgttgtttttgttgactgtatagagcttctccatctttggttgcaaagaatataatcaatctgatttcggtgttgaccatctggtgatgtccatgtgtagagtcttctcttgtgttgttggaagagggtgttttttatgaccagcgcgttctcttggcaaaactctgttagcttttgctctgcttcattttgtactccaaggccaaatttgcctgttactccaggtgtctcttgtcttcctacttttatgtcccagtcccctgtaatgaatgggtgttagttttagaaggtcttggaggtcttcatagaaccgttcaccttcagcttcttcagcattactggttggggcacagacttggattactgtgatattgaatggtctgcctgggatatgaacagagattatcccagagatcatcctgtcgttttcgagactgcatccaagtactacattaatatgaaaatggcattgtacatattttgaaaacaagaagatcgctttcttttagagattcaggccctggaatagttacagatgatatgatacactgagtgggatttggttcaaaacgtccatggttggaggtaagaggtgaggtggggcactggccaaacatagctggacaggacctaactctgccaagttggctcatagaacgtggggagccctgctactcgtctttctgcttctgaatgtgtctaaaatttttttatgatacaaaattaaaaagaaaattttaattacatgtctaaatatcttctgagtcaaacaggaaatcctaacaaccacttaaaaataagcagaatggaaaggtaatgaaaattacctatagtaacttgaaagtttctggtcttactaggaggaaactgacaagcttaaatgattgtacttgacaataataaggatataattcataagctagaaagatggatctttagaaaaaaactctagaacaaatccaaggaaaacagatgggaggggagagtaaacacatagataaatggaaaatgtccatcacccttatacagcaacacaattagaagttggttctttgaaaagatcaataaaatagactaacttctagaaaaatatgctcattctctgtgaggctagtataaagccttgtgacaaaaaccaaagacattataagaaagaaaaattacaatcctggccatgaatacagccacaaaattcccaaatcaattattagcaagcttaatccagcagtctacaaaaacaaaacaaaacaaaaacccaaaacggtaattgaccaaaatatgtggcattttaaaatgagaatgcaacatctctatagaacatctataaatgtaactcactgcattaatgacttcatcataataaaaataagcatattatatccaacaactattcattattaaagcctttagcaaactgtgaataaaatttctttagactgaaaaggggatttcttaaaaaaaaaaaaaaaaatacagcaagtattgcttctaaaggcgaatgctgactaagacaagattccaggcaacaccactgcagaggagctggctgaggggtaacaatacaagcagaaaggcaagacacgccgccgtagtgcagactctataatcatcaggctagaactcctcccctgctttccctggtggcttagtggtaaggaatttgcctgccatgcaagagactagggttcaatccctgggtaggaaagatcccctgaagaaggaaatggccacccactgcagtattcttgcctggagaattccatggacagagaaatctggtgggccatggtgtgaagggttgcaaagagtcagacacgactgaagcaactcagcacgatacatgcatttactctcttagaggaaaacagaaaaagcctccagaacgcattggctctaagtgattagattgtactcgcactgcccttggaacaaacagagctgatgacatggcatccgctgagtatttacacctgtgcgtcgtggctgcctgaacagggcagtgtccagcttcctggacgagatgctctgacacccaccgcttttgcagccccacccactgatgactcggccttcagaacctctggcgggctgcttggcgatggtttacttgctacgtcatgtctctcgaccccatgggccgtagcctgccaggctcctctgtccctgggattcttcaggcaagaacactggatcgggttgccatttccctctccagaggatctttcccacccagggatcaaaccctcgtctgctgccttgcaggcggattctctaccactgagccagtggaagggaagctctgatttttaactctgacgcatctcctcagcagacgcagagccggcacacaaaagaaggtctgtctggggacctggatcctcaacgatgccgaaatgctacaatccctggtttggctgaagagaagtaagtggcagaagatgtgtctaaacaagtgtccacttcaggccgtccccagactagcatatcacccccaagaggggttcactgaaaactctccacatataaacagaaccccgcggccaccctgaggacttgggccaccagcgaggctcgggcagagccggggtcaccagcccccaggcaggagggagcacacggggtggcctcgctggcgcagcctggtggccggcagcattgccccaaagagcaaggtgccctcctcgcctcagtgaggacccagccgacggaatctttgggccctactgctagacacctcagggttaacttaaagttcctcacattttgcagagctgtaatgaaacaaaccaaggtgttggagaaggaacaatgtgttttcattttcttagctttctcaggaattgggcaatactgctttaaggttaataaatcagcaaatgatagatagtaagtactgtggtgctggagaagactcttgagagtcccttggactgcaaggagatccaaccagtccattctaaaggacatcagtcctgggtgttttctggaaggaatgatgctaaagctgaaactccagtactttgccacctcatgcgaggagttgacgcattggaaaagactgatgctgggagggactggggcaggagaaggggacgacagaggatgagatggctggatggcatcaccgactcaatgaacgtgagtctgagtgaactccaggagttggtgatgcacagacagggaggcctggcgtgctgtgattcatggggtcgcagagagtcagacacgactgagcactgagctgaactgaagtatatcatttatatgttataaacagaatagcctgaatgaaaaataacactataactagcaaaatcggaaagtgaacacgataaaaaaaggccgaagaatctgtatgtgctaattatctaatctctcacgaggcatccacgaacactgcctagagtggctgtgtcaagaaacagccatttagctaaacatgtgggcctgtaaacaatcccgcaggaacatgtggacagaggatacagcctcccaagtggccagaaggacgacacagccactcaccctaaaaccaaagaggaggccagagagcccgcaggcaagaagtcagagcagaagcacgtcacacagggaacggcgcatacaaaccggacggagagctcagagctaaacgcgtctgctgtgccaccgagtgtgaatgggatctgttcacacagcaacgagcagattgggtaaaaacaaaatggcaattactgcccacctaggaagcatccagaacagaacgggcaaatagcaaccgaaaggaatctgaggtcgaagcatcagtgttgcaaaggtcagccctaaagcaaaacctaaacaagacgaggcccatttcatgtgcacgcgcgtgtgtgtgtttgaaagtcacaagacggggcccatttcatatgtgtgtctgtgtgtaaatcagtcatcttttgtgaccccatggacggtagcccaccaggctcctctgtccatcgaatttttcaggcaagaataatagagtggattgccattcccttctccggggatcttctgacccaggggtcaaacccagctctcctgaatcgcaggcgtattttgtaaccactgagccaccggggaagccagtcggtacacagcttaccatgagaaaagggtgtcctggagctgcgtgtcctctaatgaaagccaagatggacagtgcagagaagtcagaagagacgtcaaacgggaatagagagctgaccgcagatctgaacttgctctggcgcacttggcaccagtgacccaaaacgtgagcacacagaggacctgaataacacaattaacaccgcagccaagcgagccttgagaaagctgcacgatcagagaactgatgactttcaaactcccacaaaacacttaagacgagcaagccacacaaacagaaagtttccaggtaaatacacagaacccaacgtacaggccccaagtcctgtgcacactgccacagaaaaagaaaccaataaaaccagaagaaaaacagaaattcaaccaaacgcctttctcttgaacactccaaatctgaaaggaaagtgaagaaaatttataaaataaatctaatgagctcatcacatactgaaaatttcaggaatggattacactgagctcagagagtcattcatagtcttacacacgtaagcaacgtttttaaaaaggaatcgaaacaattaagcactggactcagaaagttcgaaaaggaaccaaaaaattaagccatatctcattcaagaaaaaaagaggaacatgataatagtaaaagaaattaaaggaaatactcaagaaacagaaaatccatagaattgctaaaacatgccatgtggacaaagtttgtctgtgcttaatgggagcaaaaatgtggaaatgacagttggaggaggttttgaagaaccaggcaggctggaacgttacaagcaaaacaaaacagccctttccctgtggaaatcttcaaagatgcacaaaaccagaaatgattactgggaataccctcatatacagctctgtacaatgatcaacattttgtttcatctgttaacatccattttttttggtaactgcatgggataaaacatctcagctttaaactgataaaggatggcaaacaatgagtcattttttaaagaaacagatttttcacatcaacatcgctgttgttcagtcgctgagtcgtgtccgactctgcgatcccatccgtgagtgatgagggtaggacacgggaaaacgtcagggcgaacaagagcccttctacacactgctccaaacggacgatacaccggacaatcctatcttcagccgggctgcacggccgtagagccgccgctgtaccaccggccacccgagtctgattctcatcagacccgctgaaactactgaagtgcaggcggactctaccatctgagcctccggggagccgcttgaaaagacaggctttctttaacagagtctccagagtaataaacacactgtatcaacaatgaagaaagcattccaaacccgagtctacagaaaataaagggacttagatggcacgtgggtctccaggtacagccctctgggtccccgccaccccccaccccgcctctccgggcggttcagaaggagggcagaggtgactggcgcagggacacacccaccgtcccgctgcagttcccccggccggagcccgcggcgttcttttccgggaatctggagtgcataaacagagcagaccaacaggcactcggcgctctgtgagtccagatgaagccgggcgtcgggtccccaccccctccccactctctatctcgggaacttctccttaaagctcttcagaaaatcctttgcctgtttctaatttgttctgcatccccaaagaagagaaactgtctttgggaaatatttgcaagcgcaaattgagcaagaggctgtaaataaaaacctggcgtgcagtgggggaacttggctttcgagaagtgcacaaatgtgcttccgggaaactaaaaatagcagcaggccagctcggtgcaaaaaaaaaggagggggggacgtgctctgagttctcacgtataaaggcagccgacaagacaaatctgagtcccagaggaggcgcctggcggaggaatccagcggggggctctgccgtggtgactttagaaacggtgcgagtggatgagaactcttccacgattacaatgcaggacagtgagacagaaacaacagcagaaagcccagcgtttcatcctcaagcatttactgaagagcccccctctagtccccaaggccatcagctgtggccccagcgggaacgggtgatccaggctgcccgatccagcaccctgcccggctgctcagacggtaactgctgacacctgggttcaatctggccacacccctgcagccacgggccctcctcacctgcccacactctgcgcctgggctgtgctcactctaccatacatcaggttaccccctgaaagccatttggtttaccctaaaccccatggataaaaaacacattatctgaaaattataaatagtttcggtggtctaggaaagccacagacctcctctgcaagcgtccttgccatttcagttacgtaaggtcaagtttacataacagagagaagaaagcatttcagaatttcccctcttagcaaccccctaacgtttgcttatgggtttcacttaacagctgggttgcagtaggagccaatattacttaatagtaacagttgaaatatttaaaaatagaaggtgtttcttccacttggcagcagagagagaagggagggcagcagggggtgaagcagggagcaaccccagcttctcggggggtgggctggcctggcctctttcagcaagcgcctcctggacaccaaggtgcccagcgaggaaggcagcatcttttgggggctctgcaggaccgggagtagggccaggggtgtggggatgtagtgtgtgttgggggtggggagggaaggcggtcaggctcagatttcagtgtctgaaaggaacagctgggacgcttgtcaaaaattcaacgcacttgaagcccctggtggctcagacggtaaagaatctgcctgcaatgcaggagacccaggttcaatccctgggtcgggaagatcccctggagaagggaatggctacccactccagcattcttgcctggagaatcccccggacagagggggctggtgggccacagcccatggggtcgcagagtcagacatgaccaggtgactgaccgtgcatgtgtagggacacggcggaagtgaccgagcctctgtagcgaccggcacaggtggtggctgaagggccggtgggctggcagagtacccgttcccgtggttactgccacccctagcagcagcagtgccagtgcagggatgccaagccctcctgagggcggtgggcctgacctgcggcgtggagcccctggctgggagagcgctgcctggaagacggcaccacggacgctgtccaggacacaggtggcacgtgggggcctggccccctgcggagacgtcacagctacgtggactccatgcagccactccaggtccccagccccagcccagccccctcccagagggggctctgagagaccctttccagcacgcccgtgtcccacgccagccctcaccggcccctgcggtcaaccccctggagctcccatttcggtttggcagctccgccttcccaacgacgtgcagagccgagaccctggggccaccgtgcagtcctttgcatcaatcccggcctgcctgcccctcagcgagccccctacttccatacgcggggcagcttcagcctgcccactgcgtccatgccagctccccacccctgcctgcaatttaagctccacaaataacacggatctcggctttactcataaatatacgtgtcccaagcgccaagggtactgacggacgcctgggaaggatgaccactatggaggaggggatgagcgagtgagtgagtgggaccaaagcccgcctggcccttgagcctttccagaccccgttatttaaaactgcagagccgcttccccacgagagttctcccgtccctccttgcttcttctcctccacaacactggtgaccttctagcatctgctcacgttctgtatcatctaccgccaccaagtaggatttaatgaccgtatttagaatcctgcatctgatagctagagaatgaaactcttctacagcacatgctaaagaggcataaacactgaccacagagcaactctcaaccaaagtcagaggcttggtactctctactcacagaaatcaataacaaaagacgacttggaaaactctgtacctccagatgaaaaacacttgtaaacgtgtgtcatttttttgcaaagaaaaaagaagcatcaaagtttccagaggctaccaattagctactatcagctagaacttgaatcctacaaatgggaatttaccaaagcatctgcacctgtctccagagagccccataacctccctcaggaagaagaaaggccaaaaagtaagtgggctaaagcatgttcaacctgagagtttggagcaaggatatccacatactcgcagcccacaccgctcaccaaaagcggaaataagaacaggaatgaagggaggagaaaataaatatacacaggtatcactagaggcagaagctggttctttgacagatgacaaaacagacaaagccagatcagacagacaggtgccctggctcccacgacaccagctctgcacgcgccctgtcccgctggaaacacttggggggtcagggagcgggttcagggggagacccgaccagcaggacgctgtgggcacccctcggcgggcctcctgggctggacacacggggcgctcagggggcacctgcgggactgaaaggcacgctgccccctcccctcgggctcccaattctgctccctggccgctcccatcttgcacggccgcccaaggtcactggtcagaccccggcctactgcagcgcccgggagcccgcctgccagggacgcgggggccaggggtgtgggtccgcggctgcgggacggtgcgagtcgctgtgcagcttctccttaaaggacagcactctgccctcctaggggacgaggctgagaagtcacagcaggctaagtgtgagtgctttcccaagagacaacgacagacgtggacgagactaaccctggcaggacacactcctttagacacacgcaagggggtcatagactctggacacagccccctcacaccccgcagccccaagaagagagcagaaaagctggcttgaagaaaaagacagaaagcgctctacccaccgatgacgtgtgcacaccccctcccttcctggcatcaggcgtgcgtccagcgcccaaacagaaccaagtcctgggccggaaaaatgtcgtgtcttccacctaataaccactttcagatacaccacgaggacactaaggtttcatgttacagtttctgtatcagtgcagaccatagggtcaaggcggccggagccccgttttttcctgtaaggtggacagccagccagtggcccacctccctgcactgggctccagcgggcgcgggcggcttccgcatcagggacacctggggcgcggggccctgcccggccgcctttggggaccgcctggccgaaccggggcccgctcgattctcacggctctgggccccccagcaggctctttctaactcggcatctatggcaacaaccacaatacaaacttaatggggtggacagctggtgagaaacataaataagccaaacaacccagtttccacccagcaggggggcctgggtctccctcccgccagcactgtgggcactgcagggcgcagctgggagccggccgcggccaggcgaggcagagcgggtccggaggggcggccggccacgggggtgcgggaggagggcgcgagaagccagcccagggcggggcaaagatggcaaatggaacagtcctccagagcccaccaaagctgtgtgcgcattaaaaaaaaaatcacctacacaatcgcagataaaaggcaaaccagagagagcaaggttctaggggaaaacacacatgcgaacaagggccgcctgcctcccagccctgcagaagacacgcctgagcagggcaggggccccggccgccagcgcccccgggagacacgcctgagcagggcaggggccccggccgccagcgcccccgggagacacgcctgagcagggcaggggccccggccgccagtgccccgcagaagacacgcctgagcagggcaggggccccggccgccagcgccccccaggagacacgcctgagcagggcaggggccccggctgccagcgccccccgagaggtccctggtctctaggtgccctgccctaaaggggagcagacaggccaggaaagccatcatcacggaaggcagacccagacagacagacgacaggaccctgcagggagcctgctgcccaaggagaagggagccggccagcagggccatccagagagaagagcggcagtcagaggctaagaccgcccgccccccagctcaggggcccagctcggtccctgatcagggaccagacccacctgccacaaccatgacctggtgcagccagataaataaaagtttttaaaaatagagagacacacaaagagagagggtggccccactgcccggatgtccctcagggaggaagctgacctcagcagacaagggggccaggcctcagtatccggagggaaagcgttccccgaagccgtcagagcagccccgggtttggtgagacctgagtgaaagtaccggggaacacaagaagaaaggagacagcagggaaagagacaggagcagcggccccaggagcagcggcagcgccagagggcgcgtgttccttctctgcaaacccagccgggtccgcgagctcccggcccactcggaaccgagggatccataagagccccgatggtgcagacagcacagcgggtgcagctctgcccccaaggccgcgcagctgcaggaacacgctcggctcgctcggggccctggggacccgctgtcaaggccaaaggcagcaagggacggtgggaggcggggctggatttaggtccagaggcagaaacgccagggcacgcctgtctctcctctggagacgcaatccacggcgcagaacccacagctttctcccaagaagaactactggggggaggcatccacttccttgcctgtaaatcccaccgcccagtgttcctccaaggcagggggcgaggccttcggcgggagcggccagcgctgagccctgagtccctcctctctcgggagctcagtccccaggcaggcgggggctccacggagcaccccttggcccgagcgctgagggcagcctagccgctggtggttgagctgcggcggttcttgtggccaccgctcaaagccagacgtggcacctgcactgccgtcggtcgggggggcccggaccagccggtggatccacggcaacccgagttccccctctgtgggcagacccgtgcaccaggctcgacgttaaagacggctacgtgggcatgaatcactcaggaggtctgtgctcagtgcagcagagagcaggcgtgcctcagacgtgactccaagaaaaagcccgagcaggtgtgaagcctggtgctcaacggaactccgagcgctttgtcattaagcttctctacaccggctggttttgcttccttttaagcagctgtcctgggggacgggggcatcattaaggcctctgggctggttgtggggggccacagtcatgctggaggaagcagcagagccggggggggcgggcactgggacgagcagacccaagggtaccagtgagccgggggtcagcggacagagaagggtgggaagcacggtggggccctcccagccccccgctttctgggcccccgacgccctgccaggctgagagaggacgtgccagtggctcgaggtcacacggcctcggggaggcaggcagatctcaccacctgggccccaggcattgcttaacagtagctcagctgagccactaagcctttcctggcggctcagacagtaaactgtctgcaatgccagagacccgggttcagtccctgggtcggaaagattccctggagaatggactggcaacccatcccagtgttcttgcctgggaaatcctgtggagaaaggagcctggccggccacaatccatggggtcacaaagactcagacacgactgagcggctaacacggctgggcccagccctgaccctgcactgacttccttaccacggagcccaaagcgggagggaccaggaggaggaggaggagacactggacaaaaagacagcctggtgtgtgccatgtgagcggctgtgagcagaggagacagttccctggcccgcgcagaacagagacgagctgcgtcaggatgggcccaggacgaggaagcccaagtccgctctcccttccagcgctgagcaggtggcagctgtgggggcccccgaagctggccgtcaggccttcactgagccccatcccgaccccaggagcccagccttatgggaaaagcacaccagggaggcgccagcaggcagtacaacgggtgaggctttgccgcagcggattacgatccaggatgaactgcttcccgcggggggagggaagggccgggccagctgctttccccaggccacgtgcgtcctcagctaggcacctgccccgcctctcctctcgccagagcaaatggacaacaagaatggcaagacgtgcctgggagccatcctgagttccagccagcctcaagtggtccctgctccaaaacctgaggagggtcaagcaattcggtaacccttgcatggcgcggtggtcggatgctcgggaagattcgggaatctgcggctggagccagacctcactttttcatagcaggtttgggtaagttctccagagttttggaagtgtcttcaagtttccattattctctttaaaaaaatgacacccttgtcacatagccttgaaaggacagctcgggaacgccaacggaaacgcatgtttacggtgagggcaacggcgtccccggtgaggctcctgtgtggtcggcaccttgtcctggtggctgggctggcctagaggtcccagccttctctgagaggtggtccctgcagagcagaaatgggcccgtgccccgttgcatacctgccggctgaccctggggaagctgccttgcccctcgcctctggtggggagtgggcccttggcagtggtgcccagatgagcctctcgagggcccccagggctgcttcctccacgctgctcccggcaacaggagcttatccttcaggccctgcacccatcctggtgctgagcgtctccacggtccggctccaagggagctcgcctgctgggtccgcagcctgcaccccacacactcaccacgaggcctcttttccagactaaacacgcactgcttttataatcaggagaaaagtatgctactttcaaaaaaaataaacgaaagtgattcaggaatggaggaccaaagtgcttgtagagtccgctggcacagcgggcatgcaagctctctgccagggcccagctctcgcctcctcctctgccctcaagtcccacgtctctccccacctatactctgagcttcccgggagcccgcagggtgcctgccactctgcctgcaccccaagtccccacccaggaaggaaaagacaacccccctgagaaggatgaggtggtgacattccacttcatccaaaaaatgaggaaatatgatactaacacagatccctgggtcgggaaggtcccctggaggagggcatggctacccacgccaggattcttgcctggagaatcccacggacagaggagcctagagggctacaggccatggggctgcaaaagagttggacacaactgagtgcacacacacacacacacacagacacacacacagacacgcacacagacacacacacagacacagacacacgcacagacacacacacaacacacacagacagacagacacacacacagacacacacacaacacacacagacagacagacagacacacacagacacgcacacacacagacacacacacagacacgcacacagacacacacacagacacacacacagacacatgcacagacacacacacaacacacacagacacacacacagacacacacagacacacacacacacaccacacacacagacacgcacacagacacacaccccacacacagacacacacacagacacacaccccacacacagacacatatacacacacagacacacacacaacacacacagacacacacacacaacacacacagacagacacagacacagacacacacacacagacacacacagacacacacagacacagacacacagacacagacacacacacacacagacacacacacacagacacacacacacacacacacacacacacacacaacagtaacggaggagctgttatgacccagtggtaggcaaaccgttatatgttttctcccttttataatagaactattcacaactaaaaactttaacacaagggaaaaaatgcaaaaaagaaggaaaggcttgttaacatataaaaagttaagggggaaggtggagaaatcagaaagaacccaaaacaaagagcgttttagcatgtgccttctacaatgcaaacttttctagtgagagagattcttgtaggaatgacctcaagtcttgagtcaagatggcccacaaatagaagggatgaacggtgtttttttatttgaagtaagacttcacaaggactgactgtgtttaaagagaaccattgtcagaaagactgtcgagagggctgcctttcacagccaggaacagacaagaaatgcacaaggtggaggtggggagggccacgtgggcacttgcccgctcacggtaaaaggcgtgcattcacgagagcaagttcccacagggactgctggagtaattcctgcaaatcatagagtctgttttcacaccgccgagtgtcaaaagagtactttaagctcaaccgggattgacataacacacctgaaaatgtctctacccccgtatcataaaaatgtggctctaggatgttcctggtgggccagtggttaagaatctgcctgccaatgcaggggacgcaggctcgatcccttggtcctagaggattccacgtgccaccgggcagccaagcccgtgagccacaactacctagcctgcgagctgcaactactgagcccgcgtgcctggagcccgtgctctacaaagagaagcctccgcaatgagaaggctgtgccccccgactggaggcacccctgccctctgcagcgaagacccagctcagcgaagaataaataaatattctatttaaacgtggcttgacagaaactgtcaatactgattttcaaattattatataggctgaggtccgtatttctttgttgaacgcactgtacagtgcttatgtaaatggggagcgtgtgcttggtcgtgtcccgactctttgggaccccatggactgcagcccaccaggctcctctgtccaggggattctccgggcaggaatactggagtgggttgccatttccttctccagtacagtactcagaatgaccgaaagcatagactcttaaagaatgccctttgctttagcagcttctaaggcggagctcacggcgaagactctgtggccagtgtgcggcatgggcagccccccggcacggccctcctcctgcaggctggtgctcatgggcgcctcttctccgggttttacagccacactgcacacgccgacccgtggggtcaccagcaagcgcagcgtcatcctctgactctaaccaatggaatctggaggtgtggggctactggctcctgtgtcctgggggcccctccccgacatgccatctctgaagtggggggcttccccaaaagagagagacggggggtagcagaccacgaggactgggctgggatcagagccggcatggccacggccctgtccacgctgtctccagcgtcctgacgtctacccagggaccaccaccaacagacacaggcttggtctctgagaatcctgcagagacgacgtgattatcccatccagggctgagaccaagacactgggcggcttgcttgaagccacccagtccgtgggtcaccaggattccaggcctccccccgcacccatccagaacttcggtccatgttcgtacatgggaggcccgcatgaagtctccaccagcaggacgtgcttctcaagctgggaggcgaacgggaagccacccgctttctggctcacttgggaaccacctttccacagtctatcaagctactgaaaccccctccacccacacctgggcaagcatcaggaaactaactgcctggagaggcctgagctacacaagaactcggtgtttaaaccaaagctgccctggccagacggactcagggaaagggaaagcggccctctgactctgcgggggtcagacaggatagcggagcatcgccagctgctcgtttcagccctccccccaccccccgccgtcctgggtgaacgtaaacctgctgggcaggtggatgccagcccggggccgtggcaccttcaaggagcactgcagacacccgcagctgcgtgtctggggagacgccagagacagcgctcggcaggcctccgagagttgctagcaaagaaaggagtctctcctttgatgcttccagctcagcctcgacttctttctagccggatggggaaggtgcagccacaggcggtggggctgggggctggggcagaggcaggggtctgcatgcccctcctcatcctagccggccctgcacatgcagacagcgggcacggtgggtccaggcaggctggcatccaggaggtgccacggagcgcaaaccacaaagacaggggccttgcttcaggacacggccaagccaggcccggcagtgctgacctcaaaatgctgacagtggctcccttacatccaccccaggccttctcggggtctgttttattctcagtaaggccaaggagcccgagagaaacggatccagtctctgagctgaaatcctggaggataccagatggaaggtaagcattttacaagaaggagaaagaaaggcttccacagccgtgtagactagaaaaacactgcccagggcgcagcatgcagaaatagggtacatggaatgagaaattcctaatcacagctgacgctttttgctaattacagaaggaaagcggctttgagaaacatcaaggacactttcccccaggagcttgcggccctggacccagtgagacctgccccgtggtgtccccagctcaagcgcagggctccttccttcgaggcctggagttagaccccaaacgagcagttctcacctttggaaagaacacaccctgtcggagctcaggacacagaggacctggaattctctgccacttaagtagcattaagccgcgcccatttcatatccaaaaccatcgccctattttaccccggggaaagagcacgcaacccccttggacctgagaccccacccctttctctccacacctccccaggatggtggagccccagacacccctttgggggcgcccagtgcccagcagggctgggggagcggactcaccggtgctgggcatgtggttcacgcgggcggggttgagcagctccactggctggtctcggccagaaagtccatctggaggacagagaaagcactgggcatcagaaactgctcgtgattcaatgaaagcatttcacacgcggagtctgcaaggagcacttccttgcagacaatgggaatccatgtgtccttctcacttttaaaggagacgggttctattttgatttggggaatcagaaaaagaaaagaccccgtgcacaacaacccaacgagctcggatctccaacagagcaaacaccagtttctggcctgcgggcgtctggctgaggcaaacagccagctgatagccacagcgcatttctggagcgaccgcgagcagcaggagagtacacacagaagagctgattgccgccttcccagacacagcccaggggcccagggccaccgagccacagcccccgaggccccgtcgagagcacccaggctgctcccgctctcgggacgggcgaggaaaccaagactcgcaaacccgctcccgggaaaaccccggcccaggctcccagaaccgaagggaccgtttctcacaggtttacctttcgattgtattctgaccgcaaagatggcagaaccagaaccacacccacccttcactcagcacagggtgccatcagagcacattctcccacagatgagaaggaaacaccgggaagacttccaggaatcacacacttgggatgtaaaattagctccaacaatgggtgtgaacattcacggtaacaagggcgtcgtcacagacgctggcgtgtggtcactctcgctagtgactttcaggagaaatcactggtttcccagagcagccattggctccctcgggccagcttacaaactgggacaaaagcaagtaagataagagcaggtctcctgactttatactaaagccttgcttttcaccccaaatggacatcatcttgtggccttcgagtgcattattccatgaccgtggtgtgtctttggagacggtcaaaatccaaggacaaacaccatgaccctgaggagaccccgcagcgtctcccgaggaagcagagaggcctctgcggcgtcatgggcctggagctctctgctcagagtatgatggaccccacacacaagctgatgtttggcctgcccacccgggtcagggaagggaaccgctgggctccgttctcgggctgggccagcttgtgcttcacacaagctgcaaatccgagccccacgtggacatcctcccagccctgctgagtgaggtcaggcaggaaagctgcacgggaagacggtcccgcctcagggtgaggctggaggaggcgccctgcctctcaggaggcgtctccgcaggaaatcctctgacagccgactctgcagaggggccatcaggggctggagcccagctccggtgcccgcagcatggggccgggaagccgggagagcccgcgatgccgggtacacggcccacctctccccactcctccacagactaccatgtcagcccgatgccaccagcaaactctgcactcctcactctgaaagggggatctcagaggcccagacgtgggaggtctcctcgcagaaggcagtagacaggacagcaggggtcaggacctgaatcaaggcgggactgagcaccaggagatcaggccacggggaggacatgcaggcgccaggcctcctctccctgcctgctggcagctctgggagcctgaggctgccagttcagggcgtgaggccccaggagtgtgaggaggactcctaaggtcacaaggtgacgacccgggctgagaacacggaggcgtgcgggaaccccttgagcccctggggcattcagacccaaacacagagggaagatgcattgtatccacggatgggggcagcagggccccaagtggcaggtgagctcagcaggcacacgactgtgccaggcatggacatcagccctggggatgtcactccacatcacgtcggagaccagagccggtgatgagtaaccctgagggcctcacaaatccaggtcccggtctcagggctcacaaagcaaagctgttcagttcagctcagccccatggactgcagcacgccaggcctccctgtccatcaccaactcccagagcttacccaaactcatgtccattgagtcagtgatgccatccaaccatctcatcctccgtcgtccccttctccgccttccctcaatctttcccagaatcagggtcttttccaatgagtcggctcttcgcatcaggtggccaaagtattggagcttcagcttcagcatcagtccttccagtgaatattcaggactggtttcagagagcacaggttccttcttcaaggtcacgggtatcagtctttcttctacagctttcctttctgtatcaggtttaagaagctcttcctcccgcggaggttgcaaagatactttacattaccgccatctgaaagtgtcgtggtttttcccttttgtgggtaaatctcatctctctggtatcgcttttgtatatggtataaatgtttgtcttttttttttctttctatgagaacagccaaatgtcccattaccattattaagccttactttcaggacctttcggcaacactgattctgttacaagccaaacttctgtcctttaggccaacttgtttatacctgtgccaataatcacactaacagccataagttgacaccaggtcttaccacccggccaggtgaagcctctgtcttctgcaaaatcaccctgggcggtactgggccctaaccacagaaatctgagaatcagttaagtcccaaagaaagaaaaagacagaggtggggagacagacagaaaaaggaagggagggcgttgtttttttcaaactaaaaagtctcttatggatccgtacatgactcaaatgcctcctacccccgcaaaaaaagggtattgcggtctcttccccagccctcccctcggcccccgacacaacaccccacaacagcggcagctggagctcggaacagggcgagggggtgctcatgccgagggagtcggcccgggagaggcagcggagcctcggagccgggcccagactcccggggccccgatccacatgtccgactgcgaggcagagctgggggcgccggcggcctccctgtcctccgtggagaagggggaggaggagaccgtggcaggtgaagagccattccctcggcctgaggacagagcctgctgccccgtgatgggcccagagctgggacccgcccccgccggtgccccggacccctctgtgaagggcgatgtgggggacaggacacgcactgtgaccggctgggaaagagaaccgggaagggaggaaagaagaggaaaaagggagcctgactgggaccgcaccgtgcccagactttgggggcagagaaccttggcagtaccgtgtgtcccaactcatgaacacggagcatcacttcatcgcatttctctcaaaacggttttagactgttgagtgcagagatcttgaccatctttagtttattgccagacacttgatacttgaagtaaaatattatgtaacccatggactgtagcacaccaggctcctccatccatgggcttcttcaggcgagagtactggagtgggttgccatttccttctccacgggatcttcctgacccagggatcgaactcaggtctcccacgttgcaggcagacgctttaccctcagagccacaacggaagcccccaaacactatgaatagtactttaaattttagctgctatttgctggtttttagaaacacagtccgagtttatatggtagctttgcaccatagcatcttgctaatcaacccacattcattctaatcgttcacctgaagttattttggactttctacatgtagaaccacatcacttctgatagtgactgctcttcctctccagacccgcagcatttttgtgtctttttctcaccttattctacagctcagacttagagtacattattgaacagaaatagtgaaagggaacacccttgtctggcttgccatcttactgggaatgtttgcaattatttcaccagcaagtataacacttgttgtcggtttctgacataagtttattagtttaagaaaagttccctatttctactgtgcaaagactactttaaaatcacgtgtgtgtgcttaactttattaaacttttctgtatcaattcatacagtcaaataattccccttttcatctgagaatttccttttcttgcgtctaaccaacttgcatttctggggtaaatggacttggtcaggtccagtgagtcctgagacaaaaggtaaggctgaagtcatacagatagatgggatttgagcgaggtccggactctgttctacttttgattccaaagtgttggcaacccagcctcgcatttccgccttagctccacacttgctctctcgtcatggacgtgaaagaactggaaaaggcactattctgaaaggtgcttagtggggctttctcaacgtaggtcaccaaaatgaagtggggatgacaaggctgcctgtcacccggttcgtttttttaatttttagaattgttttattattcttattgctgctttattcatttttagttttgggccatgccgcgaggcatgtgggatctgagctccttgaccaaggactgaacccacgctggtgctggggctgaccggctggggtgacaccgtccgccaggcctctccacagcagaggtgctcgcttcttccccttccacacactgctctttggaagaaagccaatatgagctgcccacacgtgtcaaagggtctgagctctcctccccacacttctcaggagctaggaagagtgggcctgctcccgaggaggccacaggagcacaggggacccagggcagcccggtagtgggacctccgggaggaggtgcaggggggcagggcccggctgggaccccgaatggggctcagcggggcaggcgggaagccggccctcggtctgcgtctcccggacgcacttgcaaggtcagcgtgcgagttacttctgtacctcccgggctccagagcctggtgagaagctaggacatctcagtaagaatgatggtcttagcccccgctttcccctccctccccatgaactcaggtgttattacagggaacttgctagaaggcctgcaaaggaaaggggatccctccccagcacgtgtctgagtttggggtttccctctgccgcctggatcgttaaggctcctggacacgtctgcgatgagggtccaagggtgaggaggccccaattcctggatgtggggcctcagctgaggagaaggcttccaaatctggagccacaggcgggcggggcctggcggaccggggctgtcggagggaaggtgctcagtgtttcggtgtggggccaccacgagggccgatcctcccggacaaatgctctgggtccttccagacggactcaaggagaaaagacaggctcctgcggtggggatgtgtgcgttgctgtgtgtgggctgctttcaactcgacagaagagagctttataaaaatcagtccccctttataagaaggacaaaaccagcaggcagtcctcgcgtctggtcagaggcttgctgaccgagccccagtgaggacggaagggaccggcctgggcgggagggttggcgcacagggcggggtctgcgggccaggctcacctgctgaccctggccctggcccgcggggtgcccagcccctcccatgctgtacgggtctgtgcagagcgtgtggggtgtcgcaggacgccagcgtgccctgcccctgacccgtgggcctgtggcaccctcctactgggagcctgaccctcttgctcattcacaccacggaaggtggctcaggagcctgaaatgccacagccacaaacgactcccgaggtcggaacacacttgcgttccccgggccccttcgcctggcgtggaggggtctccatcgcccgcgccggcaggactcggcccctcccatcctggcctcccgccgctcagctccctgcctcctttgccaacaggccctcgggcacccctctccttcccagtccacgtcccacggggtccccgcccagctgacaccagcctcgctccaggctccatacactcaggacagccaggcgggcgcctcccccccgtgagctctgctaagagccaacagcactgcgaaccattagatgcttcttgtcctcatcatgcacgttgtggaagaatgacccagttctataataaagcttgtgtgtgcccattaacgtgaattaaactttaatgagctaagtgttatgaattcctgaggcacgtccaataccgtttgcggatatttattaagagaaaataaaaacggaagcgggacctttttcctctagagcagtatttttcctgcaggaaaatcaggcaaacttcacaaaggtgaaggctgctctctgaggctttcctgtgcttgccctgaaaatcgaatcccctccagctagctaccagattgcaggaaatacgcatttcaaggcacaggttcaatcagggccaccgggaggctctgagcaggcaggtgggaaggagaggatggcaggtcaaacgccccggctcccgggctggtgggcgagcccctacaggctagggactgcaggtcgggggctcaggcccaggtctgcaccttgacctgaaaaagcgacaaagccgaccagcaaagtggaccccagcttggatgtaagatgatatttgggaattagtattcattttgttgagtgtgataaggggattacacctgttagaaacacacaccaaagtatctatgggcaagtgctgtgacatttgggatttgttttacattctccaggagataaagcctggggaggggggtctgatgacatgggaatggtcacaaagcctggggttttgatgggtacaggggactctcaccgcaccaactaaagctcatctttttttttttttttcctggaattcttcacggtaagagtttctgagaggtgccaagacaagccctcgcttcctgttcagtagcatctgtcctcacttcacacaggccagcacactggtctaaccagttctttcactagcattcctaaccatctccagctgattaccagcccctagctgtgcaggcaacggaaccctccaaacacacgttcaactcagcgaaggggtcaagaaatgatatttcctgccgtatcagtaaacatggatgccacagtcatcagcgattccggccctccaaaagtgaatttctgagtcctgagggcgctcaggaaggagaacagtacctgcaatgtggcagccagcaggctgcagccatgccctgcgggcagcacccaggagctcgggacgctggccccagagagctggggtacatgagaaaggagtgacttcagggagcccagactcttgcatcttcccgtacgcagaaaagcactaaatccctgaaactgggttgtctggtttccttttcttaacaataacctcgtgatgttcagaccacctgccctttgtcgtaaaacttctatataacctggctcctcccgttgcctcctcagagcagctctctcagggctactgagatgccatctccctggcttgaagtcctaaaaatccccacggaataaggcgtaactctcaactttgaggctgtgaccattttgtaaggtggctggatcctgggctcctgagatgcatggggcacagaccccagctgatgtcaggtagacctcagtcctggtcagggtgggactggccctcacctacgtgagacacgacccactgaccagaaagccaggtcgtgaggaaggacacgcagtgagcgtgatcacgggctcccaggaggggcctggacctcagagctgcccgtgggggagcacacgctgtcccatccctggggttcacgtccagctcgagctgcaggaggggaaggagggaaggccagggagggatgcttcgcgggtgggcagtgctggagccctggaggccaggcaaacgccagctctgtcctccctggcccagggccatgtttcctggaggcagtttcccagcccgcctttcggaagatggtcctccagggactgtctgcccctccccagcctccccaagtggagcccacagctctcagctgtccccacagcctggcccagctcaaccgttaataagtgatttagaaaatcaggagagagtgtcctaagcccgcctttgaaaacagatctgtctctgctctggggaggatgtccatctgccctgcggggaggacgcaatcgggtgagtcattccaaagctgtttgctagagctctggaggcggacaagggaaatgacctcggaggcagaatgtgcagattcttggagtccgagcaagaaatcatagacgacagaaggtccacaggggcccgagcaggcgcacacggtgagcctgcatctccgtgacttaagaacggcaaaaaggaacacagctactggcaaggactgagaaccagctgaggcccacctgtcgataagcaggcttcctccagctgctcagaccagcccgcatgcctctgaaaagccacaggcaaactcaccaccgtgaattctgcaggcttcctactttctgaactaacgacctctgaactgccgagcggtctaatggacacaactccccgaggccaccccctcaccgggacacagcagccctctgcgtgggacaaggccgtgtcttggaggctgggtggccccgggggattcggggtccgccaggacaggtttcccccgaacacggagggtggtgagtggtcatgtcgcttcagcccaggctcagtttcctcctgtgtcaagtggggacgtaaactgacccggggtaaataaaagaacgtaagtgaaggacaataacgtgcccctctcacttcacatgtccctctgagacacgcgcggccccgtctgcgggcagaaccaacgcacgcccagtcccacggcggctgatgggacgaagcacctcctgaaaccctgagtcagcgaggaaaaccactggacggatgagccggtgcccagcccgccttccacaccgccgagcgttaaagactagctggaaggtgtcggtggttaagcaacaggaagccagaaaagaggtgcctgttaataagcagcttgtgagaagtgagtcacgaacacagaacaataaacccacaatggccatttggagcaagttcacgcaggcaagttgacagtgtggctggagcgcgctcatgggggacgcaccctgcaggctctgggggcacagactctggtgctgagaggtcacggcccgaggaaggcggcagaggactggcatgggagtgacgccagaccaacagctgcaggagctggggcccggaccgggccgcctccgcccgcgcggcacccacgccagcctccccttgcagccacgatcatctcaagtcaacgtacaagtgcagctgaggggccaccgcggggtggacggggaagcctgcaacacgggctttgaaccttctcaggaagcctgcctttctctcatgtttgtactacctaataatatacagcttgtagttttggtttcttaaaaatgatttccattgtcttgattttctgaaaggtaactttataaaaacaagaggggacacgcaggccacccctgcagaggcacagtcccctggagggggcgctgctccaacagtcccctggagggttcctgcagccgtggctgaaccgtcacccgctccgaaccacgtgaaccccttgtggccgagaggccgctgtctcgctgcaccagctgccggccactcaaaggtgcccacgcacgcaagagaatggcatcgttattatttaattcaaaactccccagcacatcccttcctccactaaaactagcttttccaggtgctgggaaaagctggtatacaagcagcagaatcactgttacatttgttacacagaatatggatccactgtacagagcgcagcttctcctgaaacaagacaaactgaaccttatcattattcctcttagaaccatttttatacaacgtgaacttcagtttctaaaaatacagcggttgcactccactgtgttctattttaaccttctaaaaatagagctactgacaggagcagcaatttgctgttagacactagctgtgcggatgtcggtgacaggatacggatttctgtcctttgccttctcttccgtgggtggcttggcaccctggcgggcggcaccgaggcttggctgggtccaccgagaccgggtgccaggtgccatggcccaggtctgctcctgggtgcccctgacctcacacgaatgacctgacctcagtttccacatccgtaaaatgggctaagtggcagtcctcacccagcagggcagacgggatgagaagaagctcccgtgtagaaccctgagtgacccccaggcccaaggggcaggctgcctgggaaaccctagccccagagccaggcgtggccgccttctctcccgccagcaggcgggttagttctcagaagatttagcagtaactaaggaggcacagggaaggagcagaataggagggcagctcctgcccccggagccccagggacctgtggagccctcatggggcaggcccaggggcccctgccagccacccccaccctgctcttcccaagtacagacgtggcccccagccacactggaaagtggcaggctgcttcccagtcgccagtatgttaaaaatggctgtttcaaaaaaccttccaaattttgaaagcttcacagttctaaaaacagagatatatccaaattttagacgatactctctatcttctgtattccatatggactaatttttgaaagaagaagaaagtagaaacaaagcatttctctccccctcccctcaacacagacatgcacactctgaccacccagccggtgctctggaggcacatcggcccgctaacactcacttgcccttggtttagaaaccgcacgccccaggctgggacttgaactccctgccttttaagtgaaatcacacaggtggtctctggacttaatgaagttcgggttctttatgtcttttcataggaagaattcagtgagagacaaaagttctaggtaagaaagtgaatttatttagagaaacacacaccgcacaggcagagtgtgagccacctctgaaggcaagaggccctgaaatatgaggtgggcaagttatgggctgggcgatttcataggctgatgagtgggaggattattcaaactattttgggagaagaggtggggatttccagcaacggggtcactgcccactctttggtctcacatggtcatggtgcctacatttgtgcatattgagcatatgttgatgtaagtctgggtgaactccaggagttggtgatggacagggaggcccagcgtgctgcagttcatggggtcgcaaagagtcggacacgactgagcaactgaactgatgtatcatgatgagcgtacagtgatgctcaaggtctacaggaagtcagatcttccaccatcttggacctacttggctctaaccagcttttgtcatgccctatggctatggatatccttttaaatattgtgccctgctccctgcctgcctatttcagtttcaggatgaacagccccctggcctgggcagccagaggctccacctggctaagctgcctgaacctctcactgcccagcaagtgtcctgggcacccacagtgggaggagcaaagcaagagcctggggcatatttctatccccaaagtttacctccttgatggattgcactgaactgacgacatatcttcatcttctcataaaatattataatcattggaacagagtcatctcctatccctcaaaattcaacacagatgtgaaatcatgcatgtagtcctccactgtattaatttaccaacaactaatagaatcatgaggcaaaggaaatctgtagaaatttcaccaaatcaaaaccaaaaaaaaaggagcctttcttaatctataaccaattcctttggttcttatacctatacagacagattatgtctgactgctcaggcatgagggcgattctgtaatgaaatgaagatgagcaccattaggtgggtactcagttatgactgatggggcattaaagtaaccgcagacaattagaaagaatggcaaccggttcaatgcaacttcaggaaagaggacctgggaaacaacagtggtcaaatctgggccgcttggctgaagatctgaagtaacacaggcacctgtagcagaaaccgactcacactttgggaaacacggctaccacgagcacccaacgcccagaggtggccaagacacagaattgactacaacctgaaaaagacacaaagtcaggcctctgggctgctgaacctggttagggtttaagtcatccggagaatcctatacagtctcagattacctaagaagaaacaacgctggacggagagctcgcatttcaaccagaaaagccgagagacaataaaataccttaaaacagccgagtgaactaccagtcgcctacagtgctagtgctgctgccgagtcgcttcagtcgtgtccgactctgtgcgaccccacagacggcagcccaccaggctcccccgtccctgggattctccaggcaagaacactggagtgggttgccgtttccttctccaatgcatgaaagtgaaaagtgaaagcgaagtcgctcagtcgcgtccgactcccagcgaccccatggactgcagcccaccagcctcctccgtccatgggattttccaggcaagagtactggagtgggctgccattgccttttctgcacctacagttctataccctgctaaactatcattcaagaagaagaaaaggacatttttctgacaaacagaaactgagaaagtttaccacaaacaaactcctgttgaaataaccactaatggtttatttcagaaagtcccttccagcgtggaggggtgtaatgctaggagcaagggcaaggaaatgcaccactaaccatgtaagtgcacacagataaggaccggctaccgagctgacaccgagcaccaccgactcacgaaggttactctcactatgtgtcatcccgtttcctcaaacctttgctgcagtgccgctgtgtgtgtgtgtttcaaaatcactgtctaaaatacctagtgggtttcctcttaaaaacaatgaaaatcttcaacataaacaagtttcccctcttcactttgttaaggtaggaaactaatgaccaaagtttagctcatttttgaataattccctggtgtttagtggttaaaaaaaaactacctgccaatgcaggagacacagcttcaatccccgggtcaagaagatctcctggagaaggaaatgtcaatccactccagtatttttgcctgggaaatcccactgacagagaagcctggcacgctactgtccacagaggtcacaaaaagtcagacacgactgaagcaacttagcaagctggtgtgcaggacttaaaaatatgcatttctgtgctctccttctctctgatgaaccatcatctgtactttgctctgatttctgtatctttactcatctagcccttgttaataaaataagaattaactatagctacctctgaaactgcactggctgagtcccaaagcgctccacacatggtctggcttcttctcctcacaaagaggaggcaaccagtgagacatggcccagcccaagtaactctttacaaccgtctttgcagaagcagcgtttggtagcactgagaacacagtaatagctcatcaatccaacttttaaacacaaaaagctacaagaacatgactgacagcaatcaatatggtgttccacttgacactgtatttgcatattggagagcccttctctgaaatcagctatacttgtgcagaagcaactctttgtgagacataatcaacaaaagattgcttatcctctgctacattcggaaattagtacaaagtaaccagctcttggaaagggataaaccactttatgcaaagacttttgcaaatgctctctattaatgcaaatattatgtttgtcttttatttgaatgcaaacagcatctgttttgcacagtcaatgccaccgctttgtagtttgtgctgagcaactcaagtgtgttccagctgctttttagagcttgaagcagatttccagagagccagcgtcacaaaaggaagggcagggaagagagcaggaagccagtgagcggagtacggttcctgcggctcttgcagaggcttcttcgctttttaggcaagagaaacaaatccaagcgtgaactccagaacttgcttctggagcagttgggctttctgtgtgggattttcttttttaatggttctaaggaaaaattaggattgccttttataaattcttttgttgggaaaatacactcagaagagaaacgtgtgttggaaaggaaacactgggtggcatgaggctgctatcagagtgcccagcgcaggagcaaggctgctcccctcgaaagctctgccctccccccaccgcgccctccgtctgcggtgagagtgccgatgtgggaggctcctcgccaacaccgccatcctaagatcactggatccctctgctgtctgccacagaatcgagagtcctaacagggacaaaatcttgacggtgtttctttttaaatccatgcccttaaatcaacgaccagttcagtgctggtagaagctgggtggatggatggatggatggatggatgggtgtgtggatgaaataaatcacggtctaaatgaggaaacagataatatgaaaaacctggcctgagactcttcagattccaaatacattcagcccccagatctctacctcagataatatgaaaaacctggcctgagactcttcagattccaaatacactcagcccccagatctctaccccagataatatgaaaaaactggcctgagactcttcagattccaaatacattcagcccccagatctctacccaatcaagagttcttggaaacagtgggatctcaaaacattaacaatactaattttaccattccatctgtacagaatgcagacatattaccaatcagacacattagacggaaatctccatggagtgggctggagaggaaagggggagagccttggtactttcagaggcgtctcaaaatgaacatctgctctcatataagcttgccattaaaactccagaatgtctctttggacagataactctaaaccttctaacaatccctttaatggtcaatttcattattaattacatttcgaattgactaatttccccagataactgctgaacatcttctgctactcatccctccgccggattcatataggaagagatttggcttggacaaaatacactcagaacatcagtatttgaaggacggataaacgtgacttctccaaaaaacacaaggtgcaacttaagatgaaataggtcatttgaatctcagcctagtctcaacccactccagtattcctgcctggagaatcccaaggacagaggagcctggcgggctacatacagtccatagggtcgcagagttggatacgactgaagcgacttagcacgcaacctaaatgacatccagaaaaaagctgaagctgtggagagaagaaatcagccttaaaacgcccgtgttagggttcatccagttcagttcagttcagtcgctcagtcgtgtccgactctttgcgacctcatggaaccgcagcacgccaggcctccttgtccatcaccaactcccggagtttaccgaaacccatgtccatcaactcggtgatgccatccaaccatctcatccactgtcgtccccttctcctcctgccttcaatcttccccagcatcagggtcttttccagtgagtcagctcaagggtttatgaaagaacaggaagttgaactcaggaaaagtgaaaggaaattataaagagtaaaacattaataaaacagaaaaaagatacaaataacttaggattaactaaacaaacaaaccaaaaaaatgggttctgtaaaaagactaatagaataaatagaaaaacctctggtaagaccaatgaaaggatttaggctgtcacagccggggccgggggcgtcactggcgtccgtctgggagactccagttgtcgctgttgtttcgccactaactcgtgtctgactctcttatgaccccacggagtggagcccgccaggctcctctgtccatgggacttcccaggcaaggatgctggagtgggttgccatttccttctccaggattaaacccgagtttcccgccttggcaggcggattcttcaccactgagcctccaggaaagctgggagagattccagactgctcagtatcctataaagtgcaggacagcaccgcaaacaaagagttaagtggccccaaagaacaacagtctcacagtgaggaaactctactacagctcttagggatgtgaaaaaggttaaccaggaccttaaaacaatctccatgcaaatactgataaaatctaagagctgcttgaaaactacaacttaccaaaactggtatcagaagaaatataggacctcaatagtccagttagtttgaaagaaataagatctgtaatttaaaacttccccaggaagaaaactccagacacagatgacttcacctgaaagttctatcaagctttcagttaagaaaacttccaatctgacacaaagcccttcagagaatataaagaaaggaaacaattctcgacttttttcatgagatagcattaccctgatatcaaaaattggcaggaaaaaattttacgtgttaaacttattcactaaggcgaaagcaaaaatcataaactattagcaaaccaaatccaatagcatacaaaaaggatactatatcttggtcactgtaagttcagttcagaaatgaaaggtgggtttaatttttttttaatcagtataattaaccacattaacaaaataaattttatatcatctcaatagagagaaaagaagcatttgatagttctgcatacattcatgaggaaattaacaaaaactaacctcatatgaaaccagaaacagaaagccccaacagcgatgtgatgatgggttcttaccaaaaccaaccagccagcaagacccaccacaacattgtatcgacagtgacacagtggacgttctcctctgagacccggagccagggagcatgaccactattcaagcagtaccagggctcctggccaacgcaccgaggcaggaaaaagacagacagacataaaaaatggaaaagaaaaacaaaactgtcactgcttgcaatcagcatgtagaaaactacaaagaatttatacagtagtactggaattcagcaaggtcaaccgaaggccccggtggctcagtggtaaagaagcctcgcttgcagtgcaggagaggtgggagacgtgggttcattcccgggggtgggaagatcccctggagaaggaaacggcacttcactccaacatgcttgccaggaaaatgctatgggtgtagaaggctggagggctaaagcccatgaggacacaaacagctggacacgactgagcaagcacgcaccagcgccacaagaaaagcagaggttgctaatgggcaccaacgtgagagcaccaaccagccaggggcacatctcacaaggggcgtgccctgcctcggcgtgaaacaagggagcaaggctgaagggcacgggaggccgagcagcctggtcactgctgcggttccggcccctcctccccacacccctgggcctcccctgatttccttcactcctgctaatccactgaaaacgctcttgccagcgcaaccttcctgaaacagcatctgggacaccctttgaccacaacccacgctgcatacgtttctaggtggagagcccaggtcccgaggtctcagtgctcagcacccccagcagaggtgcagggggcccagctgataatgtgggggccgcgtgaggacacccccagtcctcccgtgcaggaggaagatttccgggcctgctccgacaccctgaagcaactggacagcctgtctccagccctgcgcaggcctctgtttgatcagctggtgtcttgggcgaggaggagtgtgaggccctctcagtgggtggggggccctctctcagtggaggtccggatgtccacccagagatgctctggaatcctctatactccaggaaaggctcccctgggcagggtgaccctcagccccgacccccagggggtcctgtgaggccggtggacctactgtgcaggatggggagcggggacaggagtcaggaagggaaggccccacccacatggcccacaaggaaccgctgagggtgcattctcggtgggcacgggagaggagagcctttggggtcagcacgtctaggggggcttggagggcgtcaaccacccgtgcacgggggaggctgacactgcacgggctctgtgcctgagacgggaccggggagctgggacctggcctgggtcactggcccccggccgggcaccacctccaggctgccggatcccccgtgctgcccagggccccgaggagggctgggtgcgggcgagatggcggtgcacagccctggaatgagaaagtctcgcttcactgatccaaacggggaagccagtggtggcatggaggaggggagtcaactcagcggggcctgaggtcactcctgtgctgtgctcagctgtctgactctttgtgaccccatggctgtagccctccaggctcctctgtccatggagttttccaggcaagaatgctggagtgggttgccatttccttctccaggggatgttcctgacatagggattgaacccacatctcctgcgatggcaggtggcttccacctgggaagcccctttagcaaggggagctagggctcccttttcccatctgcccagctgagcttcctgcagggctccctgggcctccggggaagaaagcaggacgccctggtgcagctgcctctgtccgttcagctgaaactctggagcctcgctgaaggctacatcaggtgtaggttttaaatgtaagcactgctgctgctgctgctactggctaagtcgttgcagtcgtgtccgactctgtgcgaccccagagacggcagcccaccaggctcccctgtccctgggattctccaggcaagaacaggcatctccaaatgtgattttcacttatgagggcactgagagagcatgggggcaggaaatgggtttccttgggctggtcttccagtgtttacaaggaatgtacgagcgtgggactccgtggaggtcactcagcagcctggatgctctgtcctggccagagagacgtggtgtccgctgcaccgcgcgatggccaaccacacgtgactcaccgagaacattccctatgggtgatgaaggctctccatcccatgcagtccacaaaggaccctgtcaccgcgcggttctacacgcccactccgggccccgcagaggaggaggtgggtgctggggccccagggcggcgagaataaagcaccatttctcaggaggacccctgggtctatctgcaggcacctctgtctccactcatttcccccagagacgaggtgcagtttccaggccaggcaggatctgtctcctaggaaggctgtgccccgcttttccacccagagtggcagtgtccacgtggggtccaggggtctgccgtcaccctcggtgcagggggagggtggggggtggccacacctgctctgtccttccttcctggggatgtgaaactgatcagaacaccccccatgctattcacgtcagtccgtttctcttttgtccatacgctggaagctggctcagaacattccaggctcaggaaacgcctctcccccgacacggcaggccagaggccaaacacggacgctagggcccaggccactgaggcaggcaggggcttggggcctggcggctgagtccctgctgaagctgagggctgggagtgagtcctggaccccctggtcccccggcctggggtcatccaaggttagcctgtgcaccaacacatagctccctgaccccaggtgacaagaggccctctgcacaaggtgtgctgacccccagggtcaagcacacctctcaggaaaggaaaaaaaaatcacagtttctaacaaggctccttcataaaaggaactgtgaactgcttcctttccaaacgtgatttctcagcaaatacaactgactttcttatcaggaaatcactctgagaccaacaatgggtgtggtttcagaaagaaaatcactcctccgagaagccaagggctcacactcagaaacaggctttccaaaaacaaaaacctcagtgtccgcccccagcccacaaagccggccaggccgctcagctctcctgggtgccatcacggcggcggtgggacaaggacagtcccagggggcaagaggacgttgactggacagccacctgctcctgggtttttgcccccatctggacaagtgtccctctcttgctggaggcacccagaccccctccagccgggagctgaactctcccagggaagctgattgtgtctgcagggtatcgtgttccaacggtcccgccaggggcatctggccacacctcagcccagcacagccgcagattccagagcacagccatcagcagagatgacctgacccctcaggatgccgtggacacagctacaatctctaactgttccaggaagggcttcacacacgccgacggctatagagagaattgtacactcacaaaactaaccacgagccggaaatgtcaaaccacagctctgcagcactcacttcctcaggagagtacggggagggtgtgagtgtccaagtggaccacgagggctatcacacgaaagggcctgtgcaccagcagccctctgcttccacgtggctgctgcaggggtgagaccctggggaggaggtggatggcggcccctccctccccagagcctctgcctctgggcactggccttctgcactgtccatgcggaggaccaggggccaggctaggtcagctggtcacttttcatctcaatgtctgctgctcatggtttccagcttctggacttttagagagtaactcctcatgttactaatgcatagtctttcaaatgccatctcaccaaagaacaaaggtgttctcctaaaaagacaaagatcatcaaacatttaaaaaaagctgtacaccaaactataagctatgcttcaactgcatacataaatcagcattttctttcctgtctaaatgaaatcaaaggtttatcacagtaatcaggaacgatctattcgactgtcatttttaacttttcctaacttcactcattccctctccatttgaggcacgaatgggtgctgggtggaggtagccgggtcaggccactgaccgcccacagcaagcttgagcctctcagggacgggcaaagagcctcagacaagccaagagatcagagagaagattggaagaggtttagaatttcttgggttaaatgtgattctggaaagatgctgagtcaacatgcttgtatgtcaagtatgaagatattcatcagaaaagtgaacacatttctgtcctcgagtctgagttatcgcaaagaggaatcaacatacttcatcgtgctgacgtttaccaagtgttccacaaacacacacgcctcatctccgaaccgcctgggggacggccccaccccagcagccagaagcacctggaggcctcgggagagcaggggtcccaggtggacagcagggccagccgaccgcccggcctcctgttgaaggcgaggaccccctcgaggctgcgaaagaaaagagaacaggatttcccaggaaccacgttgcccggggcaggaggcagagcttccctttgctctttcatccccatcagccaagcgtagatcagaaaaaactggggaaaatgagcagctctgggaggaaacgagagtccggcttcgagcagaggccaactgggagccccctctcgggccgaggggcagaaggcccagagccgccccggcagctggacgtgaactctgcagcctggaaggagggagggcactggccggggggccgagggtcagctcctcccgcggccaagcttagagcagccccgtccttcctgtggacagcgtcactgagaagcaccccaacgtgcctatctgcacttagcccaccaatgaatgaaaggcacccacgtgtcctcgccgcccaccccagccaccagaagggctccgacagggtcggcagcaccaggcagcctccgagtgaccccctgggactcggggggcctcccagccccgcagggcggcggcaggaagtgccgagtccccaggcccagtacgctcaggcgctgaggtcaggacgtcaccctcctgccagctcaggcagggttcggtttcgcccaaggccccggccatgggatgcctgccccaggcccacctgcctcgccagccccgccagcccccgtgtgttcagaagctgagctggacggagggtggacacagcaagatgactctgagctgggagcaccccccgagacacggcgacagtgtgcacacccacgccacgtgcaaggatgagccagtggccacaggcctggggcgcgtcccactgcctcagccatggctcagcaggacctgccaaggcctcccgggggcccactccccgaacctgctctcttcccttaaatgaggagctgacacaaaacagaacatgtgactctgagcagaagagctcgttgtgcagggcggccctcgagcccagggccctccagagcccggacaccccgggagcccagcccagcggcgatgctgaccgtcagctgccgtgaagcctcgccggggcgcctgtgccaaccttcgctgcctggaccacgtcagaacctgtgggaactctgacagcagcatggtggtgacagggaggggcgtgctcagccagtcgggggacggggccatggccccctcgtgtcacgctggaaagggaagggcgcgctgaccaagcgcaaaaaagagaatcccgctgcagcgaagcgcggagacaaagaggaggaaaaggcttccaaatgagaattgagaggaagcacgcagttgctgggggtaagaaagtaaacaggtgcaccttaattggagatttgatagctcctgggaattggaccaagctccttgtccccaacaagtaagttctgcacacactcaaaatctttctaatgtgctatgcatgcaaacagggaacggcctgcattcttaaatcactgaaacagtcactcaatacgaggaagttagccagccggctgacaggtcaccatggatgcattacctgtgaggtgcccggtggctcacggttcagaccgatatatgtagacttggaaaaactaaatacagagtaaatcacatacaacagtctggctttttgtaaagaaaatgcaaagggacacttcttcactgtgaaagaaaaaaaaaacaccactgaatatccggattaacactggttcagttcagttcagtcactcagttgtgaccccatggaccacagcacgccaggcctccctgttcatcaccaattcctggagcttgctcaaactcatgtccatcgaattggtgatgccatccaattatctcgtcctctgtcgtccccttctcctcctgccttcaatctttcccagcatcagggtcttttccagtgagtcagctcttcacatcaggtggccaaagtattggagcttcagcttcagcatcagtccttccaatgaatattcaggactgatttcaggattaacactaactagacccaaattggaaaagaccctgatgttgggaaagattgaaggcaggacaagagggcggtaaaagatgagatggttggatggcatcactaactcaacgaacatgaacttgcgcaaactctgggagagagtgtaggacagaggagcctggcgtgctgcagtgcacaggggtcgcagggtcggacacgagttagtgagtgaacagcagcaggcctgagttagttacactgctcaaaaaattcttgcagaacttaaccctacgaagacacacagctctctacttgctcatgaaactgtatctgcaggaaatgaaagacgcagaactcatcctaggaggaaactgatgttgagcgtttcgctttcagagggccagagaaactgcagctgacttgggagtcacccacatttcacaagctgcggagtgtccaatgtggtcactttccgagtggccagaacacttcaggagattgaagaacagaaagtggcactgaattgggggtgactgttcccaagaccagcagcttccatccctaacagtgaatcctcctgactttcaggcagaggctgctgttggccctgtttcatagatgtgagcctgggtggccgagcctggtgacatcgagcaatcgagggccagggcccccactcccagcctcccccaggatggccggctccctgtaaggagttgtgatgggtgtgtgccccacagttaaactaccagtggaggaagggccctctgtacggtacccagggcctgcaggatgttctggagtttttgcctggggagagaaggggataatccctctctaatgccgggatagtcagcaagaccagcaacaccactctcaatgaaaattcacaacagggtgccaaactccaacacaccgtgcccaggaacaaccaaaaaccacggttaaaagaaatcaacaaggaaactcgcttctctctgtgagactcaatttacttggccattttcccacggacattcaattaaaaccaactgtgggaaaagaggatcgtggtcagaaggctgcagagcccatcgaggcaatgaagaaagtgtttcttgtaacagctggagaagcccttcagcgtttgcattcgacacgagcaagcggatcgtcaggagctctaagagggggctgtaccgtcaccgtcaatcagactcgacttcaataaacagctctgatacaacaccaaacacaagtgaccaaagaaaacaacctcatcagaatcaaaaccctttgtgcctctaaggacaccagtcagaatatgaaaaagcaacccgcagaaaagggacggaacgcttgcaaatcatttatctgacaaatgaattgcaggtagaatatacgaagaactcttacttctcaacagcaaaaaggcaaatagcccaacttaaaaaaaaaaaaaaaggcagaggactgaaacagacatttctccaaagaggctctacaagcggccaataagctcacgaaaccactgagcatcattagtcgtcagggaaactcagatcagaactacagtgggcaccacctaacacctgctaggaaggctgcagtcagaaggtcaggcaagagccagtgctggtgacggtgtggagaaaccagaggcctcacacatggctggcaggaacggaaggtggtggagatcactgtgacggtctcccaaacaggtaacaaggttaccacctgatcaagcaattccactcctaggcatgtcccacgacagctgagaacaaataccccacaaaaacctggacaagcacgccccgtacctggagcaacgggaaaggggtgggaagtgacacaggctccagcgtggggacctggaactcgctgatgctggaagccggacacagaaagaccacccactgctactccacggaaagaaaggccagcacagacacctgggtagaggtgcccggggctgcccaggggttgggcgcaagtggcgggaatgctaacaggcagaggatctaacacgaccggactgacagctgcacagcccgaggatacactgacagccccgtgagctcagctcaacaaagctgaggccgaacaccaggaagtcaaggtcctcgctccatccctgctgatgacaaggcaaaaagcgcctcccttgatctttctgccctgggagcccttcccctttgtcaaggttcacgcagaggcccggaaccccacgccacatgggcactggggggagaagctggcccctgggctccacgctgcccatcacagagcctgcagccgttgcgtccctgcctccaaaagggagccctgagctgccagtgacacgctgcaggcaccaccgagcacaagcaatgaagtcccacctggggacacccgacaggccaggacaaccagccagtttcttcaacaaatacactgtgaggaaagagaccgcgtgtggaccccagttagcacctatcggaaaaacacccaggggaaaaaatcttttaagataatcaaggattttaaaaagtgactttcgatggcctttaagcatcagtgtttcacgcgggataatggtatggtgaccacaggtcaccataaaaagtcctgatctctgaggacagacgtatgacagccagggccaggcagaggggccacgggcgagcaggccttggagggggtctggaggccatggggcagccacctggtcacttggggtttcgttctacctttgtagacgctggagagtttatgtaacagaaaacagaaggacgcccaacagaagggctggacctggagttggcagctactctgctgcttcctggccgatgctgacgggctgctggaggctgctcagaagcaaacttgggctccgggtctggaccagtcacactctctaagctggtccagagagaaacttccaaagacaagccttcgggggcacccacattccttgccttccctggagcacgcttctggtcacggccgaagcaggcagaaccgggtaagccaggcacgcctgggcccaccaccctctgaggtcagagcaggatgtgctggtggtgatgccaggcagcggggcagggtcggtgctcccagacgcggctagagctgggagcggccgggaacgtggacgtcagctacggtctaaaggacgagagcaataccagtaacctttacactcaaaatgagaacctcatgcgcctgcttcagacagaactaactgagccaaaccaggaaaccagcggtgccccggcctggcctcagccggcccctggctgggggggcttccttgtgggcagagggcacagctgccaggcagtgcacgggggcagaacgtccacccaggcctgctggacaaggctcagcactcctggggtggcacggtgggggctccggtcgcccgtggtcccacaggctcccagggccatggggaccgtcccctccgccgggtgcggatgggcagggagcggccgtagcccctcctttttaaaagttttgttttctgttggagcgcagctgatttgcagcatcgtgctcctttcaggggacagcagagcaatccagtcatacacacgacagccctttcgaattaagccgttcctacgagagatcttttcaaagagagccaacttccgacatgattttccctgggctgtcagcattcccagaactgtgactgtgtccgcggctgcgaggtggtggggaggggatagggaagagcagagagcgcctgggtcactgcggcggggaagggctggtgggggttggggggccgccccgggccgtcctaggccagcatccccgagcaaaacctccctggctgctgctttcttcacatgtggtttgactgacgcaaatcaagaggcaagcgggtgattcacgatggtccgggcccagggcacacgcagacggggcgggtgcaagcctgctgagtcactgggaaatgtccccctttccaggaggcgctgccgggtcaaacttgcacgtggacgcatgcactcagccgccgagagtgtgatggtgaggccgggcacagcacccagggaggatcgcagggcagatgcagggaggcgtgcaacggggcagcctccagaagcctgggccggccctgctgcgcgtgtgcgcaagtgcagggcactccaggccgggggcaatgggccctcttacaccagctccctggtctgacttctcagcaccaccactccccccgggggggtgaggaggtgaggggagggtgaggaggcaagatgggaagccaggatcctgccttccaggaggctcagtggtaaagaatctgcctgccgtgcaggagatgcaggagatgagggttcgatccctgggtcaggaagatcccctggaggaggaaatggcaacccgagcgagtatccttgcctagaaaatcccatggacagaggagcctggagggttacagtccatgcagtcacagagagtcagacacaactgagcaactaagccaccactcctggggaggtgaaaagagggtgccccagaaactcagtgccaagtgccccctcgaggggctgtgtgaggggcacgggggacgcagccccgggtcttgcctcggttgggggtgtcccagaggagctgaggcttgaggagggagccggagcctggcaggtgacgggtgggcagcctgctttcgggcagagagggaagcgggggcaggaggctcagagggggggatgggaggcccacaaggggacggggctgggggaccgctcgcaggcatgggggtgccctcctccaggggtggggagaaccagagaaggacccgacacaggaaacacccagcccaatgatgctgggaagaccatgctggcaacaaggacacggccctgaccgtgggcagacggagccggtcccaccgagaaggggaggcctgacccccagcaccgagggggtcctggcggggagcagacaacatacaaaatgcctgtgagccaggcgtctgtgctgctgacgggtctacccgccccctcgtgcccccttccagggcagggccgtcagaccgcagctccgctcaccggaccaggtgggacaggtgccctgggggtcggcaggttccccctgcgccgccctcgcgggggccctcacggacccccagccggcctggacaggctcctagggccatgggcgagtcagtcgctcactcctgtccgactctgtgcaccctgatggaccgcggcccgccaggctcctctgtccctgggattctccaggcgagaacactggagtggggtgccgcgtccttctccagggccccgggagcctcccccagagctggtcaggaacgcagggggaggtgggagctgctggctccgtgcacgcggcccggcgagcggtctgagcagccaggcccggggaggacagagcaggcgggggctgccgccatcgtcactctcggatctctttcacagaacgcccccaaagaccccaaccccaccccaaccccttcgcaaacacccagatgcacccctcaccgggcgctggggacacgtccaggagtcgggtgcctcccaggctgtctgcctccacggacgccctgggatgcacccggccctggcctggaaggcattctgagactgtctccttcctcgctgtcggcctgtggaagcaggccgggcagcccctcgccgggcacagcgggggccacacgcttgcggaggaggaacagaagccgccacagcggcttccttggcgtggctggggggtggggggcggccgctgacggccagttcctctcgcttcccccggaggacggcacagccgtttctttcccatttcctgtgtcttacttcacaggggtgggaccaaggctgggaggggaggtgggcggtgggggcgcagggtggggccgggcgcgggtgggggcataggggcactccctccagggcacgggcaggcctagcagagacgctgacatctccagcacaatcgcgacccaccttgagcccgccacacacccaaagacaagtttctcaacgtccttgatgaaattttaggaaacagtccaaagcagagacttctgtttctggggtgcttctgcatgctaccgggcctgtctgggcaccttaaaagccgcccccaccccccggccccaggccccccactcccaccaacacttggcctacagactgaaggccggttggttctcctacagcggggccacctgccccagacggtctgcggtgactccaagagcccaggttctccgggctgggagatacatcagacaactcttctccccaagacgtggtgccacccgcgccccggctccccaccggccaggcccacctggaggctgcggggctcctgagaaacggtgtgtgctcaccacgggcttcagaccgtcacatcttcaaatgggaagaaagaaacacagacccacaagagaggggcagggcccagcaacggtgtggcccagttatctctgagggagctcccgcagagagggggtgtccccaaaaaagagatgcctctgctaccagaagcattgtagaaatactgaccatctcacttgcaaagaaaaaaagtactccagtgcagtgacgtgtctggaccttgtgtcccaataacatgccaggcttgctgcaacctgcctcctcagacagtcctaggcctctctgcaaagccggcttccctgcctgtagatgcacacgcagcatcctttctctttaaccagagaaggccatcgtcaggggtcactgcaggcgccagatgggaagggcaggacaggtgcaaggcggggaggtgcccagggcagcctcagcacagcagcagccccccagggcctcctccagaccccagggcacaggtctccggacactttcactcgaaaccagcctttacctgcaaaaacgaagtcatgatttgcagtccttcttcgagacccaggcctgagatttgtgcccgcggaggtgatgaagacacagagcaactgactgattattagtgatccagggaacagactgtctacactgcaccaaggtacacgtttatactcacacccgccccaaagccttaggataaacgtgaactggctctcattatgcccatcttacagattagggaagtcgaggctgtaagaaactagatatgcacctgctatctaaacagcaaagctggggttcggtcctggtcttgtgactccaaagccagtcccggcagagcctggagaccctccccacatggagcacagacggcgctggtccagccaaaggctgggagaggcaggcggtgggggagtgagcctcaaacagaaacagcagcagcggtgaagccgcgcccccgccaacggaggcctccggggagcagggggccctggggcccgaaaccgcccgggctgcgtggagagacaggggagcagggaacggaatgcgcgtcccccctcggggcagacgcgctccgggctgcgcagagccggccgcccgagtgcccggaaggcggcctccagggagagagggcgcgtgccggccgggcgccaggccgctccatgccttctgcaggacggctgacaagtgtctcgctgaggccaagagccgtgagattctgcgtttcccttcccgtgccccagagtccctggagatggtttccacgtggggagggcgcagtccctgcttgcgagtgtctccttgttataggaacccagagaggggaagactctgaaaccccccccgcctagagcacctcgtctccaagagctctgggattccaggcttgtcagcggcttgaacggtgatcaaaggtctgacacacctgagacacgcccggctctgctttgtcagccctggaagacgtgttggtcatctggaaattcttccttcatattctcccgtttgtaatcccgccaacggcctcgaggcagggacagaggcagaggtcagcgtgccgtgtccctctgcgacactcagccaagggaagccagcctcggacccaaacacttttgccccaagtccccccaggggtgtggagcagcacagagctgcttctgggcatggcctgggtgcgatgaccgagtccagcccgctgcctgccccccaccagccccgactcagcaccagctcacagcagcgcagacggtgggaggagaccaccctgcgaggggtcgcacacggcccttccgccgggacccggagcccctgctgacccagagacaccccccaaggtgcccactgttatcagtgcctacagagtcctgcacgtctcgtccctgtgtgcatctgtgcacatgtacgtgtgtgtgtgtgtgtgtctctctttagttactaagtcatgtccgactcttgggaccccatagactgtagcccaccaggctcctctgtccaggagattctccaggcaagaacagtggagtgggtagcctttctcttctccagcggatcctcccggcccaggaaatgatccggggtctcctgcattgcaggcggattctttaccagctgagctcccagggacacagcattagtgaggagtgaaccagcagtgacatgccatcgctaactgaagcctgtactttgctcaggttcctctgtttccccccaacaccctcctgccgtccgaggaccctacccaggacttcaagtgacgttcagtcctcacgtcccccaaggtcccaggacgctccttgttgctggcggccttggcattgaggaggatgagtcaggtggtctgggagtcccttggtggggatggcctggatggggggctgtgtgctcagcaggaagaccgtggagctgagtgccttctcctgccatcacaccacgggtggatccgatcatggtgacagaatgtaactaaaaatgctgagcgtgaatgcgcagcacactactccaaggacacgtgtgacttcccacggaaggagggatgagaaggcatgagcggtccacccaaccccagaaatgaaagaaagaacacagacagcgcccagagcaaggaggaggaggacaagaaaccctaaaccttgcgctcaccaacagctaagcccatcgaccatcaaaacctggttcctgaaaattaaagaaagattactcagaaagagggatatgggcgcataactacaaatccagcagagattcaaaacaataagaaaatatcactgaaaaactccattgctaccaaagtgaaaatttagatgaaatggacaaatggtttaaaaaaaaaaaagtatcttaacgttatagggcttcctggtggctcggacagtaaagaatccacctcaatacaggagacccggattcagtgcctgagtcaagaagaccccgtggagaagggaacggtttccggtattcttgcctggagaattccatggacagaggagcctggtgggctacagtccattgggtcacaaagagtcggacacgactgagcgacttcactttccacacataaatataacctaaaatgtgcaaggtctgtatggagaaaattatgaaaaatctattaaaagatctaatcaatgaaaaagcaagcaaacaaagaaaagggaagatgtgatacagatgccagttctccccagaatcatccgtgtgttcaaagcaattccaatcaaatttccaattcagttttttagaggaacatgtccagtgagctccatctgtggggtcaggcccaggggcgctgggacccttggagaagagggacagagcagggaggcgtgggatagctcgtgatcaagaaaatggaaccgacccctgccttgcaccacccacagcaatcaaagacttccttgtgagagacaaaacggacagtcacaggagggactgaagttccctcttggtacagttctgcgggttttgacacatgcgtaatgtcatgtgtctatcattatagaatcacataaaatgattatgcatcagtattggttcccgggggcattcctggtagctcagatggtagaaaatctgcctataactcaggaaacctgagttcgacccctgggtgagaagatcccctggagaaggaaatggcaacccactccagcattcctgcctggagaatcccatggacggaggagcccagtgggcctagggtcacagagtccgagtcggcacgcacacattggttcctgatgctgggaaagattgaggacaagaggcgaagggggccacagaggatgagatgattggatggcatcaccgactcaatggacatgagtttgagcaagctccagcagatggtgaaggacaggggaaccatccacggggtcgcagagctggacgcgactgagcaactgaacaacgacgacaaacgtgccatagtgacgcaagatgttaatgacggaagaacgagtgccagggagcgggtatatggggattctttgtcatgtttcaattttcccataaagctaaaagtgttccaaaaacccaaagtctaatgagttttaaaaatggccaaaatggtaaattttatgttgtgtatattttatcgcaattttaaataagaaaattcactgtcaggagaaagaagttacagaagggaactatccaacatgacctccatgaccttgaggtttggcaggttttctttaccctgtttttaataagcattaactacaaaaggaaaggctctttttggcatggacaagtcgtaattttggaggaacaatttttgcatgccacttgtttgtgtttcgaacagtatgaaatagtatgaaaggcaaaaagatatggcaatgaaaggtgaactccccaggtcagtaggtgccaaatatgctactggagaagggtggagaaataacttcagaaagaatgaagagacggaaccaaagcaaaaccaatgcccagctgtggatgtgactggtggaagtaaagtccgatgccataaagaacaatattgcacaggagcttggaatgttaggtccatgaatcaaggtaaattggaagtggtcaaacaggagatggcaagagtgaacatcaacatgctcactaagcctccagtgaatcccaaccatgtgcccaggaccgtgcttcagaaaataaaaggacgagtacaattcgaggcaaggagccccagcagcagcgaggcagtcacccccggtgaggaggagcaaggctgtgagctgggccctgacttcgcccgctggacacgggaacccacaggacctggagcgactccccaagaccaccagcccgatacaggccgggggctggccgccccaggtggctctgcctggcctctaaagacacccctccatacactcggtctccctgctcccaacaccccgtggggatgcaaaagagtcagagaggactgagcgactaaacggcaacagcaaagtgaacagggctccgtcagccgcagagaagcgtggcgctttctactcagagcgccccaaagagaagaagctacctggagttaagagtacaagttctcactccaaacacaggcttcaccaacagaaagtctctgtttaaaatcttgcatgtgtcaacgactaaatttaatttgctatttcttttccaagtgtaagctaacattttccaaatgatcagacttcctcatacccacttccctaccttctgagtcaactttgagaccataacacggtaaggctatgggacgcccagcagcacagacgcaagacacagaagatccacgagcagcccatctcacctgctgaagggcaggagggggtgaaaccgatgacctagagatgtccccccggagggtatggagggacaaggacagaggacacagagcagtggtctgcagagcaggcaggaggagctgcagccagggagggccaccggcgtgcacacacaggcacacaggcgcacatgtgcacacacagacacacaggcacacacaggtgcacatgtgcacacacagacacacacgtgcacacacagacacacagatgcacacacgtgcgcacacaggcgcacgggtgcccacgtgcgcacacagacacacacgtgcacacaggcacacacaggcgcacacacagacacacatgcatacacaggcgcacgggcacacacaggcgcacacgtgcacacacagacgcacacgtgcacacacagacgcacacgtgcacacacaggtgcacgggcaaacacaggtgcacacacagacacgtgcacacacaggcgcatgggcacacacagacgcacatgcacacacaggcacacgggcacacacaggcgcacacggacacacacagacacacgtgcacacacaggcacacgggcacacacaggcacacggcacacacagacgcacacgtgcacatacagacgcacatgtgcacacaagggcgcacgggcacacacaggtgcacacacagacacatgtgcacacacaggcacacgggcacacataggcgcacacacagacacatgcacaagacacatgtaggcacacacacaactgcgtcagccatcacaccgtttctgcacagccactgggaagggcggggggaagggccacatcattcaccagcgattactcatcacacagggagcactggggttgggttttcttctccttcaaggcttttatccagtaaggactgatgaaaacaggggaaaaagcacctcagaagccaagcctacatctggtggtgccacacaggacaccgctgaccccacgttctaacggctcttccaaaaaaaaaaaaacaaaccccaagagaactgtcccaggccccgctggacacgatccttaccatgaagcctattccaagaaggttttaggtcatcgccgcctaccagcactggcctgagctggccaaggccaagtgcagggccgggggccagccgcgctggccagggcacaggcccgaacagctgtgacagcgacgaggcctgccgaaaatagccgcctgtttgtttatgtcgcctgtgttgcaaggcagcctcgtggccctctgtcggggtttgctgggctgaggggtctgcgggaacacgcagccggcagtagggacttgcggagcatccgtggagcaggaggctcgctcgggaaatgcctggattcgaccgctggcttctggaacccgggctccggggccccagcatgcaggaaggccccggcgggcccgaagccagcctgccgctgagacctcacaaatgaaaacagctttagaggacaacctgcaattaacatgggaacaattatcttcctaatttaggttaatttctacttcgcagcccgggttggcaggttgagggggggccagccctggagacatctatgtgggtgcttttttgctttgttctcccaagtccacacattttaaatatcgtcaggaaggtttcaaacatccacccgcaccttggagaaaagggcctaggtgctccagagagtgggttccactctgggtgccagctggctgccctgcatgaggatggaagccttgatcagaggcgttcccagggcactactcagtgcctgcagcacccagaggctccctgagcagaaagctgtctctgggccgggcccaggctggaaggcgggctggggctgggacacaggtgctggggaggctgtgagccagcaggccctggggtctaagagcaccagcagagcctttcccaggacacccttgcagacggcccggcagcgcagcaacgtcacagcccggctgggcccagggccccccggagccccgccggccacgcagtaaacctggggctctggcggctcccctggctgagaacataaacccttccagtgtttattgtttgttcgaggcgtgacgccaaggctgccgaacacctgggtgcggacggcagtggagggtgagcacgccaacgacgggcagagggagggggcgctgggccaaggcactgctggaccaggtgtcccggccctggacacagccgctggctgtggcagggcctggaagacacagggcatcatcccccaaccccgacgttatttaaaatgtttaacttcagttgcagaagagcaaaggacaggatcctacctggacattaaagagcaggctactcaaaaaccatgtgtcactctggaccacgcgggttttccactcactggtagcagtgagttggtcgggggggcagatagggaaaatacaggttccagttttttctttctgcacttgcagtaggagaagctcccaagagccaggagatgtttccgggggatgtgggatggacggccccctttaaaagtcagcctgttagcactcgaagcagagcgcatgcaggaccctgggtgggaaatgaactttccacgttagttaccgtccaaacaacaaatgggaagccccattagatgtgcttttacctttaaaagtaaaagtaataataaggagctacacacccatccagaaatgaggcagggctgcccaccaggcaggcttcccgggaagcggctccgggtccctgccagccggccctggggacagcgcccctcttgctgccgccttctgctcagttgcccctcagactcgtcctccctggaggaccaggagcaggctgctcaaacagcgggctgcagcaggccctttaaggactctgttgggttcagacgctcgacctggtcccctgccagcttttcaggtgagtgtaaacatcttgtaagatccggggtcccagaaaaccccatcttagaagagccgccctgcagtccaggcggagaggaacccgccaggggagcacagacagggccccagctggcaggcctgcaatgcaggggtcccagagccctcagacgtggggaccctggcactgctgaagcagcggaccccgcctctgcacctataggagcccggacctgagcaccgcggaggcaggggaccacggagaggaccggggtccagacaggcccgtggaagctgccagggccaccaggctgtgcccaaggtccggggagaccccctccaccagggctcagggagcactgggcgtgcctccccggcccccgcccggccacccttccgcctagcaaccctggcacttagcctgtgaggctaacaggtctacatgggcagcacgagcaccctgaaggcaggcacgctggccccgtgcttcctcggacctcagcgagaaaacaccgaactacacgctctcactaagcacctctggggcccagtcagctaaaggcaacagggcgacatcaagtcatccaagtgctgcagcgagaggggacgcaagtttctaggaagtgctgggccgtttcaccggtcaccccgcccgcccccctccccgccaccgtctgccgcacacagagcaggcccctctcgtgagcaggggcctgtccatgcgcccatcaggccaggctctcggggtgagctgtcatgtccgtggtgggggaacaacggcgggaacagttgggcacacacagccctgtccccaggcccccagaatccacggcgggcgaggctcaggccagggcacatggcggcacacagaagggcctgggggtgaggtgggggctgggggggaaccccgctccagcctcggctcctccgcatctccctcgcggtcaccgtgggtgtccctgctcaggcctggtgacaccggacagcaggcagaaggggtctgttcctgttcgcattccacaggccatctgcagaccgcccatgcccagcggcaagggacgcgccaggccagctcaggacgacgcccgccagcaccgctctggaggccagccatcatggagggtcccctggccctgatacgggtgatgacggcaaccgtccgtgtgggggcaagctagcaaacctcacggtcacccagaagctggcctggaaataccagacacagggaggacgcgagggaaggggctgcaagggccatcccccgtggttgcagcgccgacccccgtgatctggtgaggaggggacaggaggcacccgcttttacactcttaaaaatgtcccgcaataaacagttcccatctttacaaccgaagaaagacaaagcacccttgcttcttcaaagagagtgctcttgccgtaattaccgtataatctctcacttcctctcatgcttgaacttccctaaagctttctgttttgcgtccagttgactgttcccgttgagcttcatttaatttcttaagtaagatgtcctcgcccaaaccaccgacgatcttctccaagaatagaccggaggggcagcgacctgtatcccaaaccaggtgggagcatctcgagaagggagagccctgggacctacatgctaagacacttccctgctcggccacacactcgcgcttcacttgcagcggcttctgacggggccctgggtccaacccggccctggagtcgggggcagggatgtggagctcacaagcggggactccgatctctgaggacgtgagcacccactctacggatgaccccactgaggcccagagggtcagtgggaggaaaggacagcacccttgcaggagcctcagcagggcggggaccagcaccgccccgggccctccactggcgtggacagaaaggaagcacacgtgcagcacacacgccacacacacacgggcacacatggcacgcgcacacacggcacgcgcaggcgcgagaggccttcatcccgagccccggagcacagcccccgcaccgaggccacacaggcccggccggccccgccgccacctccagtgctgcggcccgcagctttctcctggtcccgctggttgctgtctgtattttccatgcagacagccggctgcactgagcactaacactcagcctctaaaggtcaccgtctttcctggggcctcagcttccctgcagggcttcctgcggtcagggccaccgtgctggctggcatttaagagaaccttcactgctttttttttttttttttttggacttagcatttatctgataatttctgactctccttcttgaacatcagtcattaaatcagaaacctaggcaagactccccgaccgcctggggatagtggactgggtgttggtcacacacagccccagctctgtggggctgagggggcgcccaagggttggggctctgcacctgagcagagggcgctggcggaaacgtttagaaaacgctggattgattgacggtgaaacctgctcatcaggcctgtatgaatcagatggtcttggaactatttgctctaattttccttgacattcaatatttgattattcttgccaaagaaatgacacagtgatctcgatggcttccaaaagatgttccctggggcgcaggaaaaaaaataacaaaacgttcatttctgtttatttttgtatttaaaaaaaggaattagttttatgctacttaatataaaggctgggctgtgctctaacccggaggggggaggaccccccgccccagggcaggaacatcagacggtcctgtgagcccaggtcccctcctggcctggaccccctcccagcctgggttcccctcccggcctgctccctgacccagccaggctcttagctctgcagggagtaagtgggggtcagaatgagtagccaggcagcatctacacttcccacgagggtgtgcactttccccaatatgggggaccaggggcacccacactccacggatgcagggtctgctcagaggacgggccttggaagagggacccccgccttctcaggggctgtgcctggcagccctgcccttcgggaagccacaaaccagcctgcctgatgccatgagctcagcacaggtgctcggggaccagggctcagggtgggcaccccattctgagctcgggcgcagcagggtcatggcctgcagaggagaacattcagcctttacatgtgtgtctggtgcactgagctcatggtttcacatatggggcagcccagggcagagacagagactctgagccgaggttcagaccagtggtcagtttttgtgaccgcaagcctgtgtccacggcccctctacccagaggacagcacgtcctcaggagccctcttcactgctccagcctcatgagctgatgaagctccatggggagcaggccacgccagcatcccctaggcccgccctgcagaaaccccgctgcccgtggagatgccagccactgcagctccaggcctccctgctgaggcccaccggactctctgacacaccaggctgcctgacctcagacacagggagagactttcagaaggctgcgttcacccccagaatcctggagcaaactgaggcccagcgagtgacagctcattctcaacgcagctgggtcgaaggtctcctaaccgcagggcggtcgcccccattatgcccactgccgctgtgcccacgtctgcccacagcaccgtgggcacgagaagatgcccatgagggacagaggttgaaggaaacacaggagagagacccacgcggcccgggcgtgcgagtctgctgaggccagcacaggtgagcgcacgcgcagcaccccctcagggtcaaaagaaaacgccggagactaaaccacgaaccagagacgccgggagggcagtgagctcggggcgtccagaggcagccaggccgggaccgcgtccaggctctgggactgggtttggctggcccccgggcgagtggcggctggcagcccacccgggcatcacgagggagcaggctgacgcttccagaacctgactcacagccggaaccacaaacaccgcggccctcgcctctcaggggacaccctagggctcttcagctcaagtgtgcacacccttaacccccagggctgaggtccctttgttgccattgtcactcgagcaggcgagtccccgggtgggacgcactttgcaggagattcctcactgtcttcacagccgtcctcctgctgaagtctgcttcatctaattgccagccggcagcccgggcctgggcgacagagacagacatctgaccacgtccacagccccgaaaccagagcccagcttaggcaaccagagcccggcgacgcacatgcaacacacttcacttgcaggagctgggacacgcaccgccgaggaatacaaccctaggaccattttcacgcaactatgaggccctctcatagacttaaccgtgtcatgcagcagacaaccggggaaggcaatgcactcttgcctggaaaatcccatgggcagaagagcctggtgggctgcagtccatggggttgctaagagtcagacacgaccgagcgacttccctttcacttttcactttcatgcattggagaaggaaacggcaacccactccagtgttcttgcctggagaatcccagggacacgggagcctggtgggctgccgtctatggggttgcacagagtcggacacgactgaagcaacttagcagcagcagcagtggacaacattattcccttacatacacccgagtcgggaaaaccccctcctttgtcacgtatttaaaagttgggactggctggcagcctgccaccagagaagagtccccacagtcaacacaccgacggtctgatctcttttttcctttaggaagggcggctgcaccgagcacagctgctttggacagaggcctcgcacggagcgcagagggctggaagtgatctcagcaccttaaggaactctgtgcgtgggccgggcgtacgcagacgctccggcatcagaaacgaggggcagcgggcggggttggggcctccggccacacgcgcgcagccgagggacacccgcacgtcttcggccgcaccgacgcctcacaggctggtggccggcggtcacttacgggccgaggaactgccgaccgtccacacagccgcagcagacgcctccccgcgtgagaagggcccgggctgggcccacggagcggctctgcctccactggccgtggctcctgcgggctcgctggctccggcccgagaaggcccatctggacgccgtctgcctgcgcgtccggcgtcccgccctgctcccgctgtaacccgagagggccgcagcggacgggccggtgacaggacacagctgagacgcggcggacgggggcgggggaggcgccgcggccccaggacttctccccggtcctccagcgacccccgcttccgtcacaccgctggggccagatggccggggctcagcaagtcccctgcccgccctcctaatggccgtgagaagagtgccctactcccggggctcccctggtcgtccaggggttatgactgagtgctcccagtgcacggggcgcgagttcagtccccggtcagggatcgggatctcgcctaccacagctaatacccagcgcggcaggatcatttaaagagcgccccatccccacacaagccccctcctttttcatcctcatcaggaaactcgaaaggagtcagcggggtattttccaatagctggagaaagccctcagcctggagccctgctcacagctggggtgtgggagccacgagccacctgtgaactaaccctgaaatcaattaaaaggaaaatgaaaacttggctcctcggttgcaccggccacacggaagtgctggacggccacacgcggtaggtggtctccacggtgagctgagacctccccgccccgacgtggacggcctggattggaggccgggggggagggctcctcttcactaagcatcgctctatcagtgtccttcctcttcttacaggtgagcagggaaaacgccctcttaagtagacgcgactctctgctgcacacgtggattaatctgaccgagtttgcgtgcctaatgggcgtgagaacccggaagtgcagccagcccaccgtcggcgcgcggtctccgggacccttccgcgcggccctccccttccgccccggccacgatctacgcctcacgtcacccctctgctccgagctgctccaggacccgctttcccgggcgaggggctccccaccccgaccccgaccccgggggtccccccacacgggaccacccctccagggccgccctgtcccttccccgccccctgcagggccagacgcccgcacctgagccgccgccccgcggtggtggtggggggctgtgtccacaggctgtgaacaccagccggaggccccctggtgaaagaaggcccccctccccgcgcccgcatcctgacaagtcagcctccgtcccggccactaacaggagcagctgtgggcttctcactcctgcaggacgtccccctcgcctgtgtgtgcccccagagggactgtcctcctcctgctcaagtccgcacgagcgggagaggccacgctgggctctccacaccggcccgcacgtctcagtcctgctggcgcttcatccatttgcttctctacaaaaaacacgcgagcggaagaccgagacatcgccaaggggccgctgctggtgaggctgctgagcagagcgtctgatcagggctcgctcgtcgtgcaggggccagggtgaccccagcacccgagagacaacacccactcttccccagggtggcctgccgtgagtttagcacgtgaagactggtgccccacgccgggcaacagggccagagaggcctgggagggcacccagacgcccaggcaatgggggggaccccaccttcgtgtgggggacgctggccaggcctgtcaccccacgcccagccctggcctggggactagagcaaagacaggtgtgcggtggtctaaggactgggctcccaggaagcccttagggcttgacgatttgaaggaattctttctttttatctactctagcgtgtttatttttgtctttctgtagtgcctgcttaaaattccacttcctctcctcaagacctgtcctctgtaaagggaaatatttcccactcttttgcaatcacccccaaaggtctctggtgtggcctgccccgaggtggaggctggcccgtcctgagcacagcggccgagcctcgggggccaggtctgtttctgtttatctcccagctgttttgctttgttctcttcttgaaatcacttgtcatcatagagttttcagccttttttttttctttttaagctcacagttgagaaaaccaacccatcaagtgaaagtgtccaggtgggccggaacgccgtgtcatcggtaaaaacagctcatctgtaaactgcgtcccacagcgacctgaggcctcgttccttactcctaacaaaagttctcgccgccacatgtcctgcatagacgcgagccctgtgctcactcagtctcctgggaggcccctgccctggtgtccccggcacagtccagcatcagggcctcgctcccttctccactgcctccgaggcctcccaggttctccctgacctgtctcgccttgcccccccgccttgctgagcacccatggagggcacagcccagcactgggaccgaatggcctgtaccccagcctggctgccctggcagcgaccactgacctcagccaggtctacctgagtggaccccaggcgtgaacaggattggcacaggacggggagcacagcccaggattggagcacagcacagggtagatgaggagcacagcccaagatggggagcacggcagcaggagccggggaggcccttgctccacccagcgggagcccacaagcccagcccctggagcaggaatcttctcacctcctatgaggatcacatgcgctaagccgtgtaaactggtcgtgagcatgaagtgatactggatggcagcctggtgtcactttcattattaacagtttgaaaaagcagattaacgcgcaccaggcctggcttaactctcttggggctcccgcgaggctcagatgggataacagaacacacaggagaacatcctaaacactcggggtgaattaactgcccaagtcctctaaacgccttgccccttccagaggctgtgttagaagaggagctggcccaggagcgtttcccccttgccaggctcctgtgctgaggcccccacagtcaagagccccagggttgctccccgtgttcgtggacagcggggtaactgttttctaaactgtttgatgaggattaggaaggacagtgagagcctctaccctcagaggaacaggattcaaaaaacaaaaaaagccctataaaaatgcaaatgacttggagccaaagtcttcagggtgagccccttccctctagcctagcaaagggcatttggagcggttggctggggacatgtagagggtaggacctggcctgcaggccccggtcttagcaagacctgccggtggggcagacacacccactgcctcgagggcacatgctgaaggcagttagggctccttcctgcaagtgtagacaacgcaccctcaggcacttcagtcctgtctaacgagcagccccatggtctgtaacccgctaggttcctctgtccatgcagttctccatgcaagaacactgacgtgggttgtcatgccctcctccaggggatcttcctgacccagggatcaaacccttgtctcttacgtctcttgcattggccggtgggttcttcaccactagtgattaaatccatctaagtggcacaaatgtagtcacgttcatctgactgcttctgccatgttctgtaactgtaaggacagtaacctagtggtcagtgctcacacccactgcaggtgctgggtttaaggtgagggcagacacatgggcaggtgatgcaggagtcgggctatctttgtctataacactttctgcgtgaactattttcgaaaaagtattccaaaatgaattctagaagtttacagatttgtaggcagggtaaataaaaactttgtttggctttcaataatgttcaaattattgcacatgtgcagcttcgcttcacttagtgattaaattacagccatccctagaccaatgggtctcttgggacagtcaaagctggggtctttccagtagtcatgtatggatgtgagagctggaccataaagaaggctgagcaccaaagaattgatgctttcaaactgtggtgttggagaagactcttgagagccctttggactgcaagaagatcaaaccaagaagatcgccccagtcaaaccagtcaatcctaaaggaaatcaaccctgaatgttcattggaaggactgatactgaagctgaagctccgatactttggccacctgatgcaaagagctgactcactggaaaagaccctgatgctgggaaagattgaaggcaggagaaggggaagacagaggatgagatggttggatggcatcattgactcaaaggacatgagtttgagcaagctccaggagatggtgatggacagggaggcttggtgtgctgcagtccacggtgtcacaaagagttgcacacagcaactgaacaatgacagaccaatggaacaatcaagcctgtatttcgagtgtaaatacacacacacacacacacatacacacacttttgagtttgtacaggtgaatcttcagcaaacacttccacctccctttatctggaggcttttgaggacacagtggtcactgccctcacaggccatgaagctggacagcagcaggctgagccttcgagcagccgggacacagaagcaagcagatgaatggactcctgtgggtgagctcactcgatggtgatcccacagcggggattattcccggtgccctgggcagtctggcctaatgtgtaagtattgaaacgatgctttggggactcaagatctaagaatctggcagaccagtcagtctcgctcctagaaactgaagatgagtgtggggtcacaggcaccccagctctccccccaggaagtcactgttctgaaccaatccctggtctccactggttttgctctcgtttcccaccccttcatgcactgtggttaggcttgcagtgactcccagggtccactggtcagatgtgagctgctaacccgggccctgaggtcagtggtgatgacccaggagctgacttccacgatggcaccaggacctgagaggtgacctggctgggctctttgcttgctgagtgtcaagctgagtgccaaggcccaacagcctccctgacccctgctccaagcctgcaggctccttcctgagtaaacacacgtctggggcccacacttggcctatcagtgcagaggcggctctgaacacaccccagcttcacagccttcatgactgcttgtgaagtgcacattggaaaacacactcttcaaacaagccacaggacacctgctcggcgtcagggctgggcccctgccccacgagcccccaagtgctgggctgacagcaggacagcgggaccaaggccactggacacagcagagcccggccccacccccgtccggttctgaatggtgagcagggatgggggggctgtgaaagccaaggcaggacctccccacaccggacgacgactgacaacccagcctcgtgtcccaccgagccctgtgccaggcagcggctgctcacagggagaagcttctggaaaaggcttgagatgcactggatgttacaagcccagcattgagcgggcagtagcagggccgcggggctgcagggctgggggcggcccatctgtggcctccggtccacgctccaggagcaacagtgcagggcagcctccacgaccaagcggtcagctgtccctttgcaagccaggcccctgcacgctctgctctcttccagcctcaggtgcccagcagggtctgcaaacctgacaccaaggaggagaagggccctgggcgcacagcccaggtcctggaacgggctccatgccctcagccaggccgcggccaaacccaggaccctcaggggagcagagctattttagggaacgtgaaggagtcacatttagaaacaaaacaccaccgagcctgagacctagacgacagtgacctcccagtgctgtgcagcggccactgccaggacccaggcgaggggcccaggagggcaaagggccgtacagggagaccccgggaccccggtcagaaggacgcatccgcccaccacctggcagcccccgcctcgtctacagaacgcagctccacggcgccatcaccacctgcaattctaaacacgcttttctaccgtcaagggcaacacctgctcgagagaatggcttcagacgttctccttactcagagcatttcctaatgactgcatctggcctgccgaacactgccagtgggtttttccgagctctctgttagaacacgcaaaacggaataaagatgtcccagtgtctcacagcctcctcccaggacccggagtaaggagtcgctacacacagttccgcagtgtcccgctccgtcagcaccgggactccggccctcactgctgacgtccgcaggtgcacggcacacaggcccagcagcagatgccagtgaggcccctcgtccagctggacgcaagtgaccgtgctgtgtccaggccctgcccgggcgggaccccgccatgggacggccggggccagcccttcactgtccctgggcctccgtttcctcatctgtgaaatggagtcctaaaagcacagaccccccttgactcaccgcggggttataccccggtaagttgagaacatggtcagtcaagcacgcacttaacaccgtgccctcctgaccatcacagcctagcctcctaccttaaaggtgctcagaacgctcaacgtcagcctacactcaggggaaaccgtcagacacgaagcccactttacagcaaggcgctggctgtctcacgagctgtcgtgagcactgagcctgaaaacagagtggctgtccgtgcatcggtcgctttctccgggatcacggggctgacgggggtgctgcactgcccggaatcacgagacggggtcggacccaccgctgacccggaaaagagcaaaaaccagcattcacagtacagcttctattgacctcaaatgactctcacgccattgtcaagtcgaacctcccatgtcgaggaccacctgcaccttcttttatagaagtgctctgaggacggtgtaagaagctctttaacacactgagcgtagcccagcacccagaaagcactccatacgtgggcggtcactttagatacactagactgaggaccccgagaagcgtccatactcaggactaggcgccagcgtccctcggtggctctgcgggacgggccctggacaccggagcacgctgtgacctgagcggctcccggcggggctttcctactgggaaggcaacacttccgcgagcttttcaagcaggctagtgcgaagctcacagccaagaacccaggcccatttccagggagggtctccacagaaagtctggaacccatggatcactggaggatcacgttccggaaactaacagtgacaggcatcttctcatctgttagacgagggtgagaaaccaccgcctgtggccgtctgacgtttcctggaggaggcttgacggctgtgggcaagctgagttcatcacatttcacagaggcagagacctacaccccgggtgccggccagccagaggtgctcagcgaggcctccgggcggccgggaggggcctggcccggcgggaggctgccctgagccgccagagtggggccccccagtccttccgccggctgccagcagcccccacttgaccccaccaggcactccggccactccccagccccaggcccacaacctgcagtctcggcccaggcggggccccggcaggcgcacagagcccgctcacccctcgctggcctcaccgtccaagcgggccctcgggagcgagtcacgggcccccaggaccgcgagcgctgcaccacacggaggaagccccgcgcagttcccgatcgagagaggcccgcgcgtctgctccctacctcccaccaggcctccgtcctgggcctcccagggcacggggctggatcgcagcagaaaccccagtggtgccgccgtgctcgcaggcgagcggctcccggctccgccccgacatctggtttctatttcatgcccgtgttgtcacgttacataacgagcagatgagacgcagggtcaccccggactcaggctcagggctcagccagagcgctgtttacacagggccagggccaccagaccaggctcagtgccaaggacacacagcccgctgacaccccacacccggctgatctctgcacagcccggctgatgccccacatcctgaccaaaccccacacagcgggctgtcaccccacacagcccgttcacaccccacaccccggctgacccctacacagcccgctgacaccccacacagcctggctgacaccccacacaacctgctgacaccccccacaccctggctgataccccacgtcctgactgaaccccacacatcctgactgaaccccacacactctggctgacaccccatacaacctgcagacactccacaccccggctgatccttgcacatccaggctgacagcccacactgtgactgaactccacaccctgactgaaccccgcacaccctgactgacaccccacagtctgactgaaccccacaccctgacacaccatgccctgactgaaccctgtacaccctgacacctcacaccctaacaccccacaccctgactgaaccccacacaccctgactgacaccccacagtctgactgaaccccacaccctgactgacacaccacaccctgactgaaccctgtacaccctgacacctcacaccctgactaacaccccacaccctgactgaaccctgtacctgactgaacctgtaccctgtaccctgacacctcacacctcacaccctgactaataccccacaccctgactgaaccccacacaccctgactgaaccccacaccctgactgacacgccacaccctgactaaaccctgtacaccctgacacctcacaccctgactaacaccccctacactgactgaaccccgtacaccatgactgacaccccacaccctgactgaaccccacatcctaactgacacgccacgccctgactgaaccctgtacaccctgacacctcacaccccgactaacaccccacaccctgactgaacccctcacaccctaacaccccacaccctgactgaaccccacactctggctgaccccacacaccctgactgacctcataccctgacatcccacaccctgagtgaaccctgcatcctgactgaccctgtaccctgactgaaccctgcaccctgactcaccccacaccctgactgaccccgtaccctgacactccacaccctgctgacaccccacaccatgactgaaccccgcaccctgactgactccgcacaccctgactgaaccccgcatcctgacactccacaccctgctgacaccccacaccatgactgaaccccgcaccctgactcaccccacaccctgactgaccccgtaccctgacactccacaccctgctgacaccccacatcctgactgaccccgtatcctgacactccacaccctgctgacaccccacatcatgactgaaccctgcaccctgactgactccgcacaccctgactgaaccccgcacaccctggctgacacgccacacatgcagtaaacaccacgctgcctgctcgcagctcttcacttcagccgagccctgtccctaatccctccatgcgcgttcaaatgagagggacggaggagccacctgaggccacacctcggacgaggcctcagccccggcggcacgtggaggtggagcccggccaggaggggtgtctgtcggctccctggggtgcgggggagggtggagcaggggtcctggggcgcacatccccaggaggccgaggagctggctaagaaagcgcagggacgcgccccgcgggaggtgcacgctgcgatgcccggcgcgggagctccagcagctgcccactcccagcccgggcgggcctctgccccctccacccacccgagcaccaggcctggcggccgagttcaacctttcttccaagcagcgcacgccagggtcaaggccggcctgactggtagaaaacccgaacggccagtgcatctgggggccgggggccaggtcggggggagcccccggggctccgtgcgtttccatctccctggctgctccaggctccacggccagcatggggctgacgggacctcagcactccctctcctcccacggcaggggcctcggacgtggccggggaagggccactccacaggctgcgggcgcaggctggccataagacaggcactgaccgggtcctggggctggttgaggagaggccctgagccctgcgggaggcgcgggctggacgtcaccacagggctggctctctgcccaccggctccctgctcctgtgcagccttgtctgagagccccggacggggctgctggcccgagccggtggtgggcaggtctcagggaggggtgcccactgcactcctggcgtctgacctccggcttcatcccctgccggctgcgtctcaccaggaggctgagcctgggcagggccaccaggtgggcctcggggcaaaggcgacagacagtcgctgttagacacccccacgttactcaaacagcctctgagtgggtcaatggtgttcacctacagttaaaaaaaaaaatcacacaggcctgggataaactgactggttcgtaatatttctatcagttcaggaagagcacattctattttacaaagaaaaaacagaatctcccagaaagggtgcccagcagcccaaggcaaaagcttgatagcctccttgggacgttctgcacacctggacgccgcgacggccaggctggcgctcagcagcctccatggcatgtgagtaaggatgactgcagccaacggcacactggctctgccctgtgtcgcaacgtctggcgtgggcccaccaggcggcacgtgtcacaggctgtgcagagggcaggatgaggcgtcttcacgggcgtcagctgtccctgtccacagatacatgggacatctgtgttctgtccactgacatccggaacatccgggaaatgcaaggcccaagtgttaccagcaagttgaaaatgggactccagaaatgaatgacgcttgaatgcagagggccggtgtgatcactgcttgaggaaagggcaaagggcccggaaggaaaggagagcccagaccctcaagggcacacacagactcaaggcttttacagaacttcacgcttccatcttaaacaaacaggaaaaagcaggtgttaaactgcattttcatgtgagattcccctgcggagactgtaaccgcgctcgtgctatagatgacgaagcagtatcttctccctggcaagctgtgcgggggccgggggggagctcagggccagggccggcctcatcccaggggtgcgccaggcctccccggggacacagagctcagagaggaggggggatagcgtggttcccgcagcgctgaactaacagacagagaagactgctccatgaacgtctcaaggaaaaaccccaagtcacgaagaccacaagcagatatcctcagctgacatttgagggagctcagcattaagggccttccctggtggctcagacggtagagaatctgcctgcaatgcaggagacctgggttcaatccctgggtcaggaagatcccctggtggagggcatggcaacccactccagtattctggcctggagaattccatggacagagaggagcctggcgggctagggtgcatggggtcacaaagagtcagacacgaatgagcgacttccactttcacgtgcagcgttaagataaaagcctcactatcagaggcatccagacacccagagtgcccactgccactcaaggaggccacgcagggcaccacctggacaaggactggacgctagacccggcagatgggcctgctgcacggagggacctgggtctgggggccacgcccctcctaagtgacctcagggccagggtcatgacccgccccggtctccaggctacgaggggatgacaaggaagacgctgtcaccacagctaagagacacccagaccccacagacggcctgtgggcccgtcttcccagaccacgagccgtgaggaacgcagccctgagggccaagccaggctccacagcctgccctttcctcctccgtcctccgccggccggctggagctcggcgtgaagcccaggagtagaaaagtcccctgccgtcctcaactgacagcagggaggcactgatgctcacacgcaactttcttcagaagaatgaacctctctagtgccacacgggagagccaagcccactctttcctttgtgcatccaactaaggtaaaggcccctcgttcaccttctatgacgagaacggccccaagaaaaaggaccacggcgcttcaccggcttggcccaaggatgcactgccgatgtcctgtgacccccgggaggggccccctgcactcacgcggcagcaggcaggagagatcggggtggcctgtcacgagtcccccagaacgtggcctggcctgagggcgagagggtggcggtggtgggcacgcctgcggtgccaggcccaggctggctggagcacagggctcaggcctcctctgcagagcgcagctttccggtccctcccggatctgaaccccgaggagcgctgtgctcatgggctcttggagggccctcgtgtgctccccaccagcagaggtggggggcaaggagccaaggaggagacgagctgggcagacagggctgggtgcctcgcccagcacaggggagcccatgggctgaagaaagagctggtggtcgggggtcccgtcgctcaggctgcacctctgtacgtgggaacatggagagaccgaaggtcgggagtctgcctcccaccccggcctggcccctccctctgaccggcagacggatgcactgagttcctgagtccagctgctgcctgaatttattttgtatttttagctacactggcttctcagtggctcagatggtaaggaacctacctgcaatgcaggagacccgggttcagtccttgggttgggaagatcccctggaaaagggaatggcaacccactccagtactcttgcctggagaatcccatggatggaggagcctggccggctacagtccacggggttgcagagtcggacacgactgagcgactcacacgctgaaggcaaggccacagaaggagctgcagagccgcacgatgccgacgcccctgcagcggccagcaagtggcttcagcagtgggcacgggagaggctcgcgccctggggatgcctgctctccgggaggaaaaggccagcactgaagctcggggcatgcagctcacccggccccttctccacgtgacattacacagccctgtgacagggcagcttggcctcgtcatgagctaccaggaggccaaggcagcggtcgccggcggctctctacgtctctcaccagcacgctgcaccccggaccttccaggctctccccctgccatcacttcttccctggtggcctgaggctaagactgcgcttccagtgctggaggcccaggtttgatgcaagatcccgcaggctgcatcgaagacccggtgcagccaacaagcaagcagagtagataaatcagcattgtttcgacagccagcttagggcactagcgaccgagcccggcatgagagaagtccgtgtctcgccagggggcaggcgactgtctgaaacctgcgtccagctgagtcggcaggacagcaagggcagaaactcagggagaaggaagggcgtggagcctggagcctctcctgaggctgtcccaaggctgcccgcctcagccacagctcacggggtcactgtcactgtttaaggaccctcagggcaggaggacaagtcacgggtcccacccagggcagagagactgcagctcctctggagggatgcatccacgcctgtgtcagacgctggctgggagggagtggactaagaaggaagcccccctgggagtggacagtcacagaccgcctcgtgggggccgggggagacccagcagtcagagaccgcctcgcgggggccgggggagacccggccaacaccagggcatagtactgcacccacaggggctgcttctgtgcccgcacgaggcacacgtcctccctggccgagcgtgctgtcagccacacaggacgcccggggaacactgcatgggcggaaagtcacagctgaagatcacagtgcagggaaaaaaaacccaggcagcgggagtcaggccaggacaaactgcaattacaggaaaatctaatgtgaccacaagatcatctccacaacaggtctgaggaaacagggccaccgaagggtcacagagcagaaagcggatgacggggcccgcactcagcagttgcttggccctgtgtcccgggccctgtctgcgtctcaggctctcacctgccagagagaaactgagagctgcagcttccctgagagacagctgagggaggggcgaatgagaccgtcaaggtgggctccgctgatcgcgaacgagcgctgctgatgcagaaaatggccaggcacgtttgaaaatgatctgaacagaaccggtagcaataagaaagctaatggtgaaaggtcaaagatgaacgaacgagcgacacgatcgattagacagagctggagagaggacgcgagaagaggagactggcgctgacggagggctgggtgcctgcccccaggaaaagatacaactagatccgagcaacctccacgcggacacgggccccacctgcccaggatgggagacacgagcccagaagaggaggtggcctggggacagagggaggcttcctaactgcaactcaaaagccagatgcagttgaaaaaacagaacttggtacgtctgaaccaccacggggggaggcgggagaggcagtcaacagggcaaaagcgtaaagaatatggagaattcaccataaagaattcacaaaataactgacaaactgggagaaatcgtttgcagactctcacagataaaagctaataccccctacatataaagaagtcttaaaaactgtgggaacagagcctaaaatcctgaccaaaaaccaggtcaaagacataaagacagagaagaggcctcatgctgcggtcccccttatcaatcagatggacaaacagtaagggcctctgccggcgcggtgtgggaacagagcgggccgcctgcgggccgtgccaggaatgcacgtgcccgcacccgctcgcccggcaccggcccctggcccccggccccacacgacactggctcctcctcagtccatggtacttggttcctgagtctggagacacacctcccaccgcggggaagcgcgccagcaccaggggaccacggggcacggctctcaggcgcgatgcgggcccctcctggaggcctgactgccggacgcaggagcaagacccggcgagctgtgagcgcacccgcaggtcggggatggggcggggaggagccccgggagggatggggcgaatgtgctggggcggaaaagccgagtgcacaggagcagcctgtgggatgctcgtcctttgtccaggaggcaacgcgggagggcgagggtgaggctggggagggggcagggcccagggacagaagccagaggggtaggggtgatggacacccctgctcagtccaggctcctacacagcaccggcctcgggggccacactcatgttctatgtactcaaaaagtaaagataaacaaatgaaaataccgcacagtgagtaaaagcagtaaggatgaccccagacccactgcagatgaagaatgtgacgccctgggccagaggaaggggcagggaagaaccggcccacgcagcctggggacacggtatttggacgatgcttagacttcacccctgagcaaggactgagctccagttataagagtgtttctcacagaggcgtagattaacaacttctgggcattctggggttgaacaaatgagtaaatacatcgcggagaccgggagccacgcttcccagtgtcggacaaagagtcagtcacacgtatggcaaagagcaagggcctttaagggaccctgtgaggagctggaagcacagtgcgagttcacggggctctaggtgagtttgtgtgcgtgtgtgcccgagtcagcgctcacatggacatccgtgttccagcgctgggcactgggcggcacctcccgcacaccaagcctgcttcctaaataccagcccctggaaacagaccctggcctctgcagagaaccagctgactccggggcaggggggcaggcggacacgagaacgcctcactgtgtcgcagagagtaaagggctcacaggtgtggggtcggcccggggggggctcccaccagccagacctgcacagtctgggcaccaaacgagatcttggtgacgacgggactacaagccggtcagcaaaacagccactggtccaaacgaacctaagggtgatctctctgacggccggagagccgtcaggcttcccaggtggctcagcggtaaagaatctgcctgccaagcagcagacgtgggctcgacccctgggtcaggaagatgccctggaggaggaaatggcaatttccagtattctcacctggaatatcccatggacagaggagcctggggggcgacgacccatggggtgcaagagttggacacgactcagctactaaacaagagcaaaacataaagacgtaaacatacaaggaagggaagttcttttttacaggaaagagccaatggctgaattaacaagaaagacaggactagaatatcaccaagcgcaccatcaccacagtgacagctccaggtgtgagtcatcagtgggtacagaaaccagagtcagaaactcgggggcctgaacgccgtggaggcccctcttgagatcgagggctttattaggacacctggcaaaacatgcgtcgggcccccgaggagataacgctgcgacgtggttggtattaatagctccctgaggtcggctgccatgccggctgctgacaagctgcccttgttcctgggcgacgcattagttgggggaagggtgtcatctcaaccactcactttcaaatgagtctgagaaagttcatttttaaaaatacaaacgtatacagtaattttctgtactattcttgctgctgtaagtctgaaattatagcaaaattcaaagttaaaaggaaaaacagaaaaagggctaaaatttccccagaattttttgaaagacattaacccagcaccttcagcaactccaaaaaaacgtcaagatggataaaatggaaacactcagtgaaaacagagcaaaaaatacttgagactaagctcacgaaagcaccgcgagagaagcggtggacccttgcaaggacaggtgtgcgggcagggacagttagacagcggcagacaggagtgcgggcagggacagttagcagcagacaggagtgcatgcagggacacttagcggtggacaggagtgcgggcagggagagttagacagcggcggataggagtgcgggcagggacacttagacagcggcggtgggaccctccgggccgacaatattttcaaagtgctgaaagaaacagctgtccacccggaagggtccaccccgggacggcagaccggggtgctggggagagaacgccatttcggacagacagacagtgcgagagtttatcgctgtaagaactgctagagaaacttctcaggggtgtcactgccagcagagtaagatccaaagagaagcaatggtatgcaaacagaataaatatgagattaaaattaggaagctggactcattaagaaagagaacagagtgacaagatcggacatgcgtgtagaaggcaacacacacgtctaacagtggctttgcatccagctactggaaggaaatacacacatgtgcgtgccccacacaaacacacacagatacatacacccagagagagcagttctgcagatgaaggagaaaagagaacacacagctgaacagaaagacagggacatcaaaagagaagctatagatgcccaaagcaggccgctccgttccctaaggcgaacatggtaagatgcagtttccaagcctctggcaggggcccgggtgggggtgagggaaggagggcgccgggcagcccctggggatggactggcacagtgacgcggcactccactgctcgacagtgaccctcagaggaccctgcacatgtgccagaaagcactgcggacgatgctgaaagctgcgtctgaaggtagcagcaccccaaggcccactgcagggccatccacaggaaaatgagcacgctgtgaaaactcacacaaccgatcactcagctccagcgaaaatcagtcacagctacacgcatgaacgtgaatcagcctccaaaatagtcgtgtttaaaaaaaaaaacatggaacatacagtataattccatttacatcaggttcaaaaacacgtaaaatgaagtcgcattgttgaggaacacggacagatgaatttcttaaaaccaagggatgaatttcttaaagcaaaaacacagaagccctgccaacggcccctggcttaacagcggggagggagtgcatggctccggcttgttttctcctttaaatgacactcctcacattcttcaggaggtaaaatattccataatcaaaatttttaaaaaacgtgtgggaaaatttttaaaggtatacctgaagcgggctaagaaagtaataagtcaatacagaaaataaaaatgaagggaaccatggagaattgactgcggcaccccaccaacccgggacagaagatatgggcaggtccaaatgtgctaaacagggaaacaagagaatgcagcgtctgagaccctttctgcagaaatcgggactctcacataatcaaaactgtctacttttattgcacttttctattaattactggcaaatgcaaactagacggattatcatgggtttcttacaatctaagaatctgttgagagtttcctgtttatctctgctggtttttcatatcttactgacacagtccacatttaaaagtgaaagtgaaagtcactcagtcgtgcctgactctttgagaccccatggactatacaggccatggaattctccagaccagaatactggagtgggtagccgttcctttatcctggggatcttcccaacccagggatcgaacccaggtctccccacattgcaggcggattcttcaccagctgagccacaagggaagcccaagaatactggagtgggtagcctatcccttctccagcggatctttgcgacccagagaacaaactggggtctgctgcattgcaggcggattctttaccaagcaagctatcggggaagccctgtcgacatctcaaacgtaatgaacaggtgactcactaagctgctgctgttaggacaaggcgtctagaagttcccaactgtgaaacaggcttgcttctgctttcaaataatccttaactatttataccaactgttcatttcctccaaatttggggactttttggtattcattacgaaaactggaatatttatctcatcgtttttataaaaaaaaaatctcacatatttcttaagttctctactttccctgtgccacaacgctcttgcaacagaaccttaggttgggaataaccagagaagctgctctcgaagtctttccccaatattccatgtagggttttacatctccacatgtaagtacaagctgcacagaatttttgtctcatttttgtctccagcaggttctagaatgaaggcactttcagttgcacggaatttgataatatttttctaggtttagaggcaatcttaaggagggtcaacatcacataaactttgggaaaatattgagtaaggagtaggtgcttttaacaaacattcaggcaaactaccatctgtaggaccgataaacagcaaggccctaccgtgttgtacatggaactatactcagtacactgtaacacagcataatggaaaaaatgcaaagcagaatgtatacataggtgtaactgagtcacactgctatacagaagaaattaacacaacagtgtaagtcaaatatacgtcaatgaactgtttttttaagaaaagaaacattgagatgggtcctttacccccaaaccaccagcccccagcacactctcactgcctatgaaggccaggaaggctgagctcaaagcttctaagagcagagcaaatgcgtttgcacttttacggaaggcagaaaaggctatttactcagagtgtttctgtctaagcttcttattggagatttcaccccgttcctcctgcttgttttctttatgactcggcacttcgaacactggcatatatcttcaaggtgactatatttattcggagaacctgggttcagaagcagctttccaaagatccacatgggtccactgtcttctctgaagtttatctttttgcaaaatgacaaaaggttcaatgagaagaaaaactctagcaagtttctctgcatcagctagcacctatttatgggataagcgtaataatccctaattcaatgatgcacgcgcaggtaatcaattgctttaaatggctacaagtcctgtgtggcagtgcctacgggcctgcagcaggcctcctgtcacccttgagaccacctgccgctcagggggaccatggagaaaccctgacctgccaggcctatgcgcccgccaagcccccgcacaggcacacacacacccagggcggtcaacacttcccctgacagcccatcacacctcctcggggcctcggatcacggaggacaaagtctttttaagtgtcttaagaaatatatgcttgtccaccccagatggctcagaacagcagctcccagaacttcaagtctcttaaaaattacccaggaccccaaagacttttcatgacatagtgggacctaatggtatttgttgctgttaagctgcaaggtcgtgtctgactctttgagaccccatggaccgcagcccgccaggctgctatgcccatgggatctccaggcaagaacactggggtgggctgccattcccttctccaggggatcttcccaacccagggactgaacccacgtctcctgcactggcaggtgggttctttactgctgagacagcagagaagcccaatcaatatttactgtattagaagttaaaacggagtttttaaaaaacattcacctaattcatttcaaaacagtgatgaacacaaatcacctatttttagggaaaaaagaaaaagcaccttttctaaaactggaaaaagctggtggaaggaggcgctgtctgccaactccgacgggatcgctcaggcggggagccgacacctctgcttccgagcttcgcgtgttgtgacaggtgtctgggcggcagtgacgcgggaaagcgccgcggagacacggctggatccgggcgagcatctctgcggctgcaggatggccgtgggcgggcctgtctgacgtgagtaggccggtcccgggtgagctcgtgcccccggcccatccttgcaccgcgtccccgacgtcagcactcgtcccgtgaagaggctgctcccgcgggggctgcccaaggcgtcgcgggtcagcagacacccgggggtcgcaccgctccaggatgctgacttccagctgaagggtcaccctggcggctcacacgggtggctcttttccttcatgtgacggactgacctccttctgagggaaacccctggcaggtcctcaggtctgaataaccacagttatctgtggtggttctttctggcaaggaccgtgtcccatgaaaagagtggttaggccagctggcaactcgctggctgagcggatcgtggtggttcggcttcggtgcaggagaagggccatctgtgcacgtcccctcatcgtctaggatgtcaaaaagacgagcagccccaggatggagacgctgcgtggaaggaacagtcgtcctgcctcgtgcagaatatccccaactgaagctggctcctctgggcgacgcccggcggggaggaagccctgggcgctgtgctgtggcaccgctttgctgccagctggggcccaggcactgccaccactgctgttcccggccaccagcagacacagcagcgcagtgagaaggaaagtcctgtctcagaactcttacagaccacccccaaggggctaggggacccttgcccatttaggaaataaactgctttcacgaaaacgatagccatccagtaaatctcgctaactcctggtgaagctgctctgtggagccgggcaagcctacagaggcacaaaggtcagcctccactttccaagaacacacagcctagcaacacaatggatcacgcaaaaggatggaggaaggcctgcagccacgcctctgtctccagctcttccccagccgggcctggaggggaaggaagatcccacaggactgagggaagcatctgaaggacgacagctcaggcccagggccagggagggctgcgctcagggacagccaggtcacaaacccacagggcctgtgcaggaagaaacacccacctccaagcaggcggaagtggcacaaaaactcagtttagggatttctctggcagtccagtagttgagagcccgccttccaaagcaggcagtgtaggttcgatccctggtcaggaagctaagattccacatgcttcctcggctaaaatcccaaagaataaaacagaagcaatgctgtaacaaatttaacaaagactttaaaaatggctcactccaaaaaaaaaataaataaataaaaggtaacactcactaaaaataaaaaaggcaagaactgtgcattgctcttaaaatgtttcacttgtaagaaacactaacaatttcagaatgaaatacagtttctgtagcgccctctataatgtaagttacaacgtgtctatctggaccaggatacagacacaatggtgtgcatttattaagcactgaggaagtctgatataactcttcaaaggctaaggattaagataattgaaagtgtgaaactggatggcagcttttaaaaaagagaaagaaacagctgtagtataacaacgggaaacttctggcatctgaggaatattttcaaacagaaagtgctcagagaacctgaactgtaaacccaactaagacaagctaaggccaaaatgtaaccacagttactggaaagaaacacagcccgcaggccctcgacaagaaagcctgtcctgctgcaaaccaccaacgcgaacagaggcgtctgctctgcgcggtctcagagacttaggaaaagaaggaaaacgaaagccaagaggacatagcaacttgggtctctaaacagtgtcgattaaatatgagaacagcaatgctgaaacccattaaaataaaataaataaatcctgcataaataaagctctccgtgacacccacagctctctgtgcatgctcctggtgggccctgggcgaggctgggggtctgtatgtgcccccaaggtgctggacatcaccagcgtggacatcatgtcctggatccctgggcagaaaatcacgaggctccaggctggcaaactgaggacgtggccggcagggccctaatcccgtgaggctacgaataagagggggcgtcaactgtgaacctcggctgaactccacctgctctgtcccctgtataaactcgagcccaccgctctcaaactctgcatccctggagcatccctggagaggggggcacctgagtgggggaggttaagggaggtgcagactcggagacacagtggcagggactggaggcagagaaggggaaactgtaactggagaccacatctctgtttaggaaaagcaagatccaggacgtccctggtggtccagtggttaagaatctgcctgcccacacagaagacacaggtttcctccctggtccgggaagatcccacatgctgcggagcagctgagcccgtgcgccacaaccactgaagcccatgggctccggggcccaccctccccaagagaagtgatgccaacgagaagacccccgcaccgcgacaaagagaaacccccggccgctgcaaccagagagactccaggagcagtgatggagacccagagcagccagagatgtaccagttatttaaccaactttttacaaaaagcaagatctatactgatctgagattgtagctctgaatgcttccaaagaaaacctttaaacaagtcatgtcctcttcacccagcgatgctgaaacaaagagatacccaaagacaatgcagctggaccccgactccaccccatgtgcaaaactggactcaaaacagatcaaggacccaaatataagaactaaaaccagaacgctcttagaagaagacagaggggaaccttcatgacagtagagttggcagtcggagcttcgctacgaccccaaaagggtgaggaacaaaaataaataaataaatctggacttcatcaaacttaaaacgtctgcacagcaaaggacaggcattatggagtaaaagtaaaaagacaacccatagaataggcggaactatttgcagagcataaatccagaatatatggaaaactgccccccaaactccacgacaaaatacaaaccgctcaattcaaaaatgaacaaaggacttgaataaacatttgtctgaaggagggacacacatggccgacaagcacaggaagagatgttcagtccattagacatccgggcagcgcaaattaaaaccacactcagacaccacttcacaccagcagaaggttatcatcaacaaacaagcaaacaaaccaagaaggaaaataacaaatgtgggggaaatatggacaaactggaaccctctggtattgccaaagagaatgcgaaatgcacagccacagtgggaaacagttcagtcgtttttctaaagttaaaaacagaatccccatatgacccggcagctctatccctaggtatcttccccaaagatgcagaagcagagactgacaggccgcgtgcacaccagtgtccgcagaagcatcattcgcaacagccaacaagtggaggcggcccaggggcccatccgtgggtgaaacaagtggaggcggcccaggggcccatctgtgggtgaacgggtacacaaagtatgacccgtgcacacagtggggcgtcaccagccttaaaaaggagcgaaattctcatgcattgtgcaacacggatgaccgctgaaaatgctccgccaggtgaaatgacccagacacaaaaggatgaacatctatgataccacctgtatgaggcctccagaagagacaggctcacggggacagaaaagcaagccaggggctaatagcagagaggaacggagctaatccttacagggaaagggcttctgtttgggatgaggaaaacgttctggaaatagatggtactgatgatgacacagcactctgaaggcacaacacttagaaacggctcagatcgccagtctgtgctatttatatttcacaacaattaagaagcacagcaaacaaagacactggcatacgagtttgtaacgggactgagataccagccaagcatcaaaagagaacgaggagtcattttattaactaatacggaaaaaacttgaggacggaaggatgaacacagaggggctggttgggaaaaggaaacaacaggtggctctttaaaccccggtgacttttctcaagagctccccggccctcctgctgagcgccgcccgggcagcagccagagcccctgcctccaccgcggcagccacctggggcgggcgaacggctccccaggaacacgcccagccgggctcctgaagagacacaaaccagaggcccccacacaagacgcagagaaccacagccctcagccgcggctcctcgcagctgcacccgctctggcgagcgccaggcttcagccccaacgatgaaccaacggccttcctgcgcaagtgtctgcgagcctctgatgtgcggagccgcgaggaagcgcgggccggcctgccagcgacccaggggggcagcgcccagccctgtggctgagctgatgctccaggaggctccttctgggtgaaggggaggggggcacagcagggaagtggaggagccctgccccccgcagcggaaggcgcaccggctcccgaccctgcttccggccactgcgtggggccccgaggcacaggcggcaggaatagcctcctctgcccacccgggacagggcgcgcctctcatccgccgggcaggcctctgcccacccgggacagggcgcgcctctcatccgccgggcaggcctctgcccacccgggacagggcgcgcctctcatccgccgggcaggcctctgcccacccgggacagggcgcgcctctcatccgccgggcaggcctctgcccacccgggacagggcgcgcctctcatccgccgggcaggcctctgcccacccgggacagggcgcgcctctcatccgccgggcaggcctctgcccacccgggacagggcgcgcctctcatccgccgggcaggcctctgcccacccgggacagggcgcgcctctcatccgccgggcaggcctctgcccacccgggacagggcgcgcctctcatccgccgggcaggcctctgcccacccgggacagggcgcgcctctcatccgccgggcaggcctctgcccacccgggacagggcgcgcctctcatccgccgggcaggcctctgcccacccgggacagggcgcgcctctcatccgccgggcaggcctctgcccacccgggacagtgcgcgcctctcatcagccgggcaggcctctgcccacccgggacagggcgcgcctctcatcagccgggcaggcctctgcccacccgggacagggcgcgcctctcatcagccgggcagggaagtcagcacctcagatgcctccccactcacggctggtgctcctggaaagcacggtggccaaccgcttctcctcctgaaagtggaagcaagcccactcccccaggcccatccctctggacccctcgccactctggctaggaaggcaagctccttgaagacgtcctgcaggccaggacttctgcaggactcacctgcagcgggctcagttacaccgggccaactgcccgaatgacccacggaaacactggaggcccaggccgtctccgaggcaccctggaggaaccatgacgcaggcctgagcccgctcccttgtaaactggggctttgggggtggcgtgtcatttggtttccagccctttctgatgacacgggggtagcactgccagggtgcctcggcggaaaagcttccacagggagaatttcgggatgggactcgggccagggtctcgcagaagattgcaggtgctgatgtaaagcatcagaggagttttataggaggctacacaggcttagggtctgaagagtgtgggcttcccacaggccgaaatgagactgaaacccatgcacagacgccccactggggggaggcaaacactcctgacggagaagacacggtgtcactgacacgggagaccggggaggaaaagcacactcagcgcagaaggcacgtctctgccagccccgccccagggaccggtccggggagctcgggcccttggaggaagggcctggccgcacacagaggcgctgggcgccttcccccggccgcccctgctggcgctcccagggccgctgagctggccgggagtcaggaacggcggggctgggcaggctgtttatgtctgatccggacaacggagggcttatgacgactgactgacgcgagagcgccccgacgccgcatgccagaaatccaccgcgggaggaggaattctttttaagagaccactcggaggcctcggcccgcctgacaggctgagagtgtaagcggagctctccctccaggcctcgggccgccagggagcggcagcatgcccggggcccacaggccacagggccgagcgtgggcagagctcccgagccaggagagcgaggcccagaaccgggtgcagagtccagccacacggcccaccgtgccctccgcgggccgcttctccccagacggaagccagggcctccgccagccctcccagggcccaggcgactccagaaggtcctgggggaccacgccgggctgggcagacctgcaggcaggttctcctgctagggcgatgcatcgccctatttttcatgttggcaaaatgccttcctcgagagctggcctttaaagtctgcagtcactaatcactgaggagaaaaacgtggagacacagacgtttggtctcggtccatggtctcagggcagcaggcccaagagtcgtgcgccagtgtccgggtggggggcggggggcagagaacaagcccaaacagccccccgcccgcccgctggcctcgcgtgcctgcccctgcctgccaggcaccccccttcgctggcagccccgctctgtgccacctgtgcccaggcagcagcaggtgggaccgtctggaccaggccggcagttggtcttggctgggggaggggaggccgatgagcagacgtgtgcaaacaccctcgctggaatctgctttcagaaatgatgtcagcagttctcaagtttcaaacacgaaaagacacgcggtgtttatgtttatcaaaagggcctgagcctgacaagggtgatgagcgtgagacttgccagacactcggggctgggcctgggcctcgtgacaaggacggcagctgccacactaggcgcacgctggccccgccaacccagccaaccctcacggcagacccccaagactagcctctctgcgtgacctccattctcagaagccaagcccagagcagaggtcaccagttccctggggggccagggtgggagcccggaagcccactcccagaggacactcagtgccagggagctcagcggaggaggctgtgaacgcccgagggcgcctccccgggcccatcacgagcaccccatccttccggctgtggggggcacagtgaaaagggacagggaggccacaccattgtcgagcctccacctccccaaattgacgacccagcagctgccaccccccagggaagcccccgcatcgtgtcacagtggcacttcactcgccaacacgggtgctggcttcagcacctcccaggccacacgggggagcctggttgtggcgtcctggtgacctggggcgaggcaccccaagaggccagggcgggggagttctgtacaagagcaggagccgccaggccagcagcagccgcacggcctgcctgggtctctagacaagaactgccaggccccatcagctgcctggacacaggcctcggcgctcagcagggcaggcagggcggcagcaggccacagagaggcgtgtggctaagcaggcccgccagggcctggccctcggagaggctgctccctgccaccaagcaggcacggacctccgctgatcccagggaggagctggggctcccaggtcggccagccttcaggatgcacattccagaaaaacaaagtaactgactgcagtgctgaggtggtctcctggtcataaagcctcacctcctgcagggagggaaatgctgacttcctgaatactgctgctgctgctgctgctgctaagtcgcttcagtcgtgtcctgtcctactctgtgcgatcccatagacggcagcccaccaagctccgccgtccctgggattctccaggcaagaacactggagttggttgccatttccttcttcagtgcatgaaagtgaaaagtgaaagtgaagtcgctcagttgtgtccaactcttagtgaccccatggactgcagcctaccaggctcctatgtctatgggattttctaggcaagagtactggagtggggtgccattgccttctccgacactgaaaactagcaatctgtaattcaactatctgtaagtaaaattatgtgttgaagcttaagctccaatactctggccacctgatgtgaagaacagactccgatgctgggaaagactgagggtaagagaaggggacgacagaggatgagatggctggatggcatcaccgactcgatggacgtgagtctgggtaaactccgggagctggtgatggacagggaggcctggcgtgctgcagtccatggggtcgggtcgcaaagagtcagacacaactgagcgcctgaacaacagcagaattactgacgggacagcaacaacaaaatcgtatttatttttaaaaggtctaaattagcaactataggaagaaaatatacttaaaaaaccaaacgtagtatttataaggtaaccacattatatgcagtgcatgtgttagaaaacagaaaaagtgaattttaatggggaaagcagtttctacccacatcctcccccacacacacacaaaaccagaagccattaaagaagaggggctgtctcacaacgctgcccctaagcataaaaatccccaggtcgctatttgctgacctgtggcttacttccaaccttgccagccttggctgccacttgaacgtgagaaccgtggaatctcagaggaggaaggagccgagggatcctttactacccaaccccacccccttctcaacacacaatggaaacgggggcccagggctgcgtgagctccaccctacccagtgcagaaaccatcgccgctacagtcatgacattaacggcatgaaaagcaatgtcctacgaaataatgctcaagctaaacctggaatgaattcttcattcactctgggggaaaaaacaagtaagttaaaagcaaggggaggcggtgggggaggcaggctggcaggaaggcgctcgccaagtgtgcgctgcactcagatctggggactggacgtttataaggtgtgacatcaatcacctcgtaaaacacccaagcagaagtgctgcgagagcagcccggggccgcaggtacgcttcggtccgctataaagtgtgcctggcagttacttcactggaaccttccagaaaggtcagggcacgccgggacagtcacccgggaacccttccacacactacgtggcaccttccactttggctccggccaactagcccacgttgggccagccctgcagcacagcggttaacataaaaacatacgtgtgtaccatgaaggctttggagtcagactagaggggcgcaggcaggagagagaaaaagagggagaggagggcacggtttgaacccatttccccaggaggcatctgctgacacaccaggttccacgtggagggtgaggagcagaccctggggagtgagatgccttcagagcctgcctgtgcggagggttcatgcaagcctcctagctgggacgcttacatattagctgactcattggagaagaccctcatgctgggaaagatcgatggcaggagaaggggacgacagaggatgagatggttgcatggcatcaccgactcgatgcccgtgagtttgagcaagctctgggcgttggtgaaagacagggaagcctggcgtgctgcagtccatggggtcgcaaagagtcagacaggacttagcgactgaacaatgaacaacagcaaaagaatgaataccaactcacaattacaacaaggaattttaaaatatcattctcagtacctgacagaaaaagcaggtcacaaaaaccagtaaagcagcagaagagctgagcatggtgattagcatatttgacttaatagacacacacagaatcgacgaatctcaattattttcttcaaataaatataaaaaactacaaaattgacgatatcatgataaaccaaaatacaaaaaggttttaaaaactgaaagtaaataaaaattcagtgaccataatgaaattaaagtagaagtcagtaacaaaagcaaaatactaagaaaggcaccaaaggctgaaataaagaaataaaataacccatgagtcaaagaagaaatcaaaaaggaaatcaactattattctaaactgaatcacaatgaaaatggcattaaaatacctatgtgatccagaaaagtcaaatataagtgaaaattactgctttaagagcatgcactatgaaagaagaaaatctgggaataaattcaatggacataaatatttgtctcaatttcttaaaaaaaaaaaatccagagaataaaaggaaatactagcaataagatcagaaattgattcttttttaaaaatatctaatagaatgaagaaaatcaaacatggttgtttgcaaatgttaaaacaactgtcccagaaagtccagtggaggaaaaaaaagagaaagaataaacaagcaatatgaatgaaagggacatcagtataaaccctacaaacgctacaaagataacgcaagagtatttaaaaacctacacaagtacatttgaaattttagacagaaagaaaaaaattctgagaaaaactaaacacatcaaaacggacacaagaaaacgagaaactttgaatagtcctacatcagctgagggtataatttagaaatcatcctactaagaaaactacaacatacgttcaccaatgaattcttctgaatatttaagaaagaagtaacaacatacccttatataaactctaatccactgaagatcagacaacgatggcccaaagccgtatcaatctgtggcctcactttgtacaatttgctaagtaagacgggtttttacaagtttaaatgcctgtttttttaaaaaaagaagaaaaatatgcaacggaaaccatatgtgttccacaaaatatttaccatctgactcttttaaaaaaattctgtcaactctaggaatagaaaaagaggataatctcattccattttaagaggccagtataaacttcatattagaattgaacaaagacatttcaaggaaagaaaaccacagaccaatttcagtcatgaatttagatgaaaaaaaataagcaaaatagaagcaaaatgatttcagataaaagaagaataatatattataatcgagtcagatttactaagaaaggtaagactggttgacattcagaaagtattcaagaaaattcatcacattaatgaaacaaaagaggggaaatcatacaattaatagatgcagaacaaaatgtaatatattgttgtttgtcgttgttgtttagccctaagtcacctctgactcttggcgaccccatggactgtagcctaccaggcccctctgtccatgggatttcccaagcaagagtactggagggcgtggccatttccttctccagggggtcttcccggcccaggaactgaacccatgtctctcacattagtgggtgggctcttgacgattgaggcacttgggaaaccctataatatactaaggtgaatcaagtcaaagtgtcatttttgtagattgaaaaagatcaaacatctgcataccatgtggttcaatctagtattgtaacactgtctcatgagaaaattcaactaataagggcagaagagagctgcgctggtctgattaaggctgttacggaaaacctacagcaaatttcatccttaacgatgaaatgtgaaagtttctcccttgatgttcaaacaagacatagatgctcactaccactagctctgttcaacatttgactgaaggccccagacaattcaataaagcaagaaaaatacatagaaagttgaaaacttggcaacaaaaaaattaaaacgtttactatccacaaacagtatacattaatatcccaaagaatctacaggtaaactagagtaataataagccaactctgaaggctgtctagagacacagtagctacacaaaaactaactgcatttctaaatacaacaaacggtaaaattttttaaaggcaccccatacaatacctagaagcaaatgtaatagagagtgcgaaagaactctgccctgtgaaatacaaaatgaaaaatgtgattgaaatgattaaaggagacccaaacagaaagatgcatcacatccacgggttggaagattaaaacaaactgattttatacacaaaccagtgaaatgcccatcgagatccccgtaggtattctgctggaattgaaaagctgattttaaaattcatatggaaaggcagtgggccaagaagaaccaagacagcctttaaaatgattcaaaaaagctggaggacaaacaatgccagctgttagaagcaatcatacagccccatcagttaactctgtgttcactgacacacagataaagcccaggaacagagccgcgtgtgtgacggcggctgcggacacagtggcaacacagcagtggaggaaggaagcagcttttaacaagctgatgggccaacggagcgcccaaacgggaaagccagccctcagctactgctgcacatcctattttcttaaaaaatcaattacgggtagaccacagatccatttggtaaaatgacacttctagaaaataatagactgcaagacccaaccagtccatcctaaaggaaatcaaccctgaatattcactggaaggactgatactgtagctgaagcaccgatcctttggccacctgatacgaagagcagactcaactggaagagatcctgaaggtggaaaagattgagggcgggaggagacagggatgacagagcatgagacgtttggatggcatcagcaactcaatgtacatgaatctgagcaaactccgggagacagtgacggacagagaagcctggtgtgctgcagtccacggggtcataaagagtcggacgtgacttagctactgaacagcaactacaacagaaaataacagactctttccgttgcattcaagcaggcataaataaaatgaccagtagctggacaacgtgaaaattaagaacatctgttcatcaaagagcatcattaagaaagtgaagaagcaacccacagacttaagagaaaacagccaagggaacaatcaacaaaggattcgtctcttgcctatgaaaacaacggccagccagcaggaaaaataaagacaatcgagtctcttaaacgagcaaaagacttaaacaggcacttcagcaaaggggacgaagctgtttgacgtatatatgacaggatgctcagcaaattcagtgactggggaaatatgaggcgcgtctcagtggccagaacagaaaggagtcagtaccacttgctggccagcaggcagcccggaggtctctcggagcgtaatctggcacaggagatctgaacagcgggctcacgcacaccttatcaaaagaatgcgtgggagcacgtgtgtaaaagccgcagcccgaaaccacccaggggtcgtcaacagacaacagacgaactgtgatctgcgtatacaatgaaatatcacacacccgtgcaaaggagcacacagcctgggtcacgtggagtcagtcagtctcacaaactgttgagggaagaaaggcagacagaacaggcagatgttctgtggctgagtttatgctgctgctgctgctgctaagttgcttcagtcgtgtccgactctgtgcgaccccatagacggcagcccaccaggctcccctgtccctgggattctccaggcaagaacactggagtgggttgccatttcccttctccagtgcatgaaagtgaaaagtgaaagtgaagtcgctcagtcgtgtccgactcttagcgaccccgtggactgtagcctaccaggctcctccgtccatgggactttccaggcaagggtactggaatggggtgccattgccttctccggctgagtttatattaggttcaaaaccaggagagactgatccaaggtgtgagaagctgaaaaggagattcccggggcggggggcagggaaggggctgcataaaggctgctggggtcccctgagctcccctcttcccactccgcacagcactcaaccagtgtcttcctctcgtgagaattcaagagaagcactggtggtttgtgcatctagagaagatgcgtgtcctaccccagtacaaagttcactcagcagtggggcccctcaaggcagcgctgttcagggcagcagcaatagtgagagggctggaaagaaacccaggatccaccccgagtgcctccttaaacgagcaacatcacacccacgcacaaccataaaaaagaacaggacattgttctgtactaatttgggcttcccttgtggctcagctggtaaagaatccgcctgcaatgcgggagacctgggttgggaagatcccctggagaagggaccgactgcccactccaggattctggcctggaggactgcgtggactagtccatggggtcgcaaagggtcggacacgactgagcgactttcaccttcactttccgtactaatttagaacaatccccaaaggaaaaagtttaaaagctgggtgcctaagcatctgcaatctattctcattcataaatagagattgggcaagagagaacacctatgcatttatttttttttaagtttatcgacagacttcactgaacatggagtagacaggctgagtccccgtgtgtcccaccaaccagcctgcactccgccccccgggcagtgaccgccactcagctcttttcgggttaaacttccttatgacagctgcgggacagtgcatactgacaggcacgttcttggtgaagtgcgggtgagttacagcgcttcgggcgcacagccaagtgacccagtttacagatacctactctttcagactcttttccattacaggtcactacaggacactgaatgcacttgtgaagaagttccgcggatcacagttgagatcccacatacatggggatcacagggcagtttctgtctgtcctagttcacctagtgtgaccatctatgtagtccacccgcgttgccgccgaggcaacagtccattctttacactgataacggtatttttaactgaggtcaccactccctccagatcccctcgtatccaccccaggagcctgtccgggccccacgctgcgctgagtcctcacatctgtctccccaggctcccctgggctgtgcatctggctgccgaggacgctgacggtctggaggcatggggcgggggccctgggcaggtgtatcacaggacgcacctctacgggggtcggacagctggcacgacccgggctcgaggttgccccatgggcaggaagatcacagaggtaaggcgccaccatctccacacaaattaatcggaaattcccggagaacacacacgccctcactccaccacacaggtggcacagaagagggagcgggcacggcaggaggcccgaggggacggggcagacagctccccgaaggcacggcgaccgggcgcacgcgggcctcagcagcctcaccgcaggacacatggcccaggttcaggtcgtggggtgtctgccgggctcacaccgacactggcacgcctcggggcctccctcccatctcaccagcaggcagccacatcgaccaaaaactccagggaaaggaagctggctacctctctgaaagaggaggagattaggactcatcagagtaaacaaagtgagcccgagtttggcagacggggagaagagccggggctttgtcccaatcgcgcgtttggtgacgggcagctgcgtcccacggccgccactgctggccctcccctggggccccacgagcttcccacggcaagggtgcacgagcagcgcccgcgtccgcagagcccgcttctgcccccagacagacgggcgcacccccaggccctgccttcccaggaacggcgcgagcccagggggaaatggctgcttcggcccagggccagggccccggccccgaccgacccgcgagcagctttggaagcggcccggctcgggacaagtgacgactcacacggagagtgagcgctgctggctggctcttcctcgctgctgtctctgccaggagggagggaaagcgacaaaggggaggaacggctcagatacctcctccccgcggacaggcgcgggcagagagaagtggaggtgggtttgtgagtctctggctcggagtccaaggcaggctgcaggagggcaccgcacaacgcccatgctctggggaagtggcgcctccgtcccactcacccaccaggtcccggctgctcacagaggagagcgggctgccaggaggggaagctccgctcccggctcggggtccagggccccaggggcactggctcaccctggtccccaagcaaacccccctgcggccccccggtgccttgctggcaccccaaagctggtgtgtcctggggacggggcttcctctccctcgctccttgctcagccccttattccttcctcacacccaagcaggctcaggtccctgttccccttcacggggcaggacctgaaaggcgtttgcagcccctgcagggcacgtgggactgtgtacttctccaggctgaccctcagccacccctgctgccaggacgggtgtcaacatccaacggagtgaacgctccaactcccatgatgctaaacaaggtcccattccatgctcagtctttttgtgtttgctttttaaatccaaaactagaatttgatattcagaattgagacatcactataaaatgcgagacaaattcgtactttttccaggccttttcttaaatctgctgcagctgtcatggaacttctttgggtttggatgagtttagcttagaagtggcagaggccgctgcaatcagggaggctctgagctcagtcaatctaggagattccagaagcttccaaaggatgagggaggctccgctgcgaacagcacttcagccagttgtggaaggttccagagcaagacgctcaggtcacgtggggcaggcccagcagctcctgcccccgtccggcgtccaccaggacctgagcttccgcttcctatggcagagttttgtttccagcaagcatgtgtgtgtagaactcacttgaaagggatccacaacaattgtgaaggcagcagaggatgacatggctggatggcatcgctaactcagtggacatgatcttggacaaactctggaagacggtggggacaggaggcctggcacgctgcagaccatggggtcacgaagagttggacatgacttggcgacagaacaataaaacgggaaaactgcggatttagttgccataaaactggaaaatatagaccctggctttgtagaaaatatgggtgaagatgttatcttgatcagggattttaaccaatgtctgaaaatgaatgtaaaaactcatacctcgagccacctgtctgccccgtccaggtggagtccagctgccctctggggggtggggaggatacgtacccctccattgtgtggctgtccacccaggggtggcaggccatgcccacccctttccagggtagaaaggtctggattttgaccgtgaatacggggccaccttacacagacccctgtccccctctgctccagtgcggggttctggaaggaggagacacagggttgcccacctgtcaccgcaccacctccaccagccacacgggcaggtaccaggctgaaggcaaagtccagtggcccgtgtcttcctgaagggcgaaggcccggcacagcacagcccccactgggaggcacaacggcaggctcagagcccagccatcctcccgtggaggcggcccggccagcacacaggagccaggggacacatggctgctcggccccgtagctaggccagcctccctgcccacccccagcacctccagctgttccagaactggaaacactagttaagaagcactagcgtgatgttttctcagacaacatggaacgtgagaaaggctcttttcttctcacagataacacggatgtttgaaaccgtacccctcagtcagagcaggctgaccccgtaggaacacacatgggaaaggccttagagacagcatctccttcagaaccacagctgctgaggccgcgtccatgccaatcgggcaccgatccactcataacagggtccacatagcatggactggatgctggagtttccggtttagaaagtggagtgcctataaacgcgaagagaccctcgccccgagggcctcaggcactgagtccttggccccatggggagctcagagaaagcccagctgagaaccgagaaggccgcgactcggtccaggccagggccagcagccgtgtgagcatgacgctgggcagaggggccagccagtggagcacgaggcgctgagacgagagaggaaggggcgggaaggctggacgctgaggggggcagagcggggagcgtgcctgcccgggagtgtccctctgcagcacatcggggcagggatagacagatgtcccgggtctggggtctccccggctccatgcagcggctcatcacccaccaggccctgctgcccccctcccgcctccgggaccgctccagcccctccatgaaacccggcgttcccagggggcccctcaccggctagtgtggccccagccccctttccacgccaccaaaaatgccacagatgcgggggacgtaacagaaggagcccaatcccagaaggatggaagggcagacagacggctgcaccctgctcagaggccccagcggccctggtgggggtggctgaactgggcgccttgccggctgctcagaccccaggcagagtgtttcctgaaggcggggctccttgggacagaaaaaccccagtggggtgtcagcacttctaggccaggtctcctgcagcaccgagttcagactctcccctgcgatcctccagccctcacctgccttggtccaacacctaccccttccaaaagcctttaaggaccctgacggccaaaaccgtacccagcaaagaatcagctccccagggtgcagcatcgtctgggaggacggagacgcagggtcccacaaaagggcccgggtgacgggaaccccacgtgcacagcccccaggcagcagccgcctgcaccccgcccccactcagagcctcagaccccccgcgaggagcgcctctctgacctgtccctccgcggcagccacgccctctccctgtcacttagggaactgtgctcatgttcaggacctacagctaacaggcgaccacagacacccaccagccgccgacgcgatcctgacccgctgccccgtcttcatcctgtcaccgtcagtgactcgattccaacacgctctgagtgtccggcatggcaaaacacaaaggccctcatctccaactttggctaaacctcccagcgaaaacctctgccctccacggtctccgccctccccagtgccttcccaaattttctaaaagccctttctgtgtattagcacctaagaaagagatccattaccccgccttcctcccattccctgattctttcagtgagagtgaaataaagcagtcagctccccgggcccaggcgtgacgggtctggatgaaaagccacgtggagactgcaggtgttcaggcaaagcgctgggatgggcggcttttcaagcacaaaaagtggcaagcaggcttgcattttgtgtgtcagaccctggtgagggcggggccgtaagaaatagtcaatcagcccctgacttggatgaaatcaataaaacgtgaaaacgaggagcattaagaattctgaatcatgctgttcaacactagaggaactttcgctaaatacatctactgcaagaaatgggaacacgtcagaaagggcccttcgtacagcacaacatccagtagggctgtgctaagaacagagtctgtggaatcccttctaactccagcagcactgcgcaaatcttaccgaatcaacaggtcagcgcgaggtgtagctctaacaaacgcctggtttctacaaaggacatcgcaggaaaactcaaaacactgcacttaagaagaaataaacttggctgtgaatgcagacaagtcaaaacagaatctttagctcctggaacacaaggtcttcccttggcatcaacaccttgaacagctgcaccgtcagaagcaatcttctacaagaccgcctcggagttcaaaggtgaaaataactcgccatcagtcacaaaagtcccctcaacagacgaggcttgaagacagggcttaacaataacaaatcatcaacatccagcaaaggtacagggtcagagggcccgtgggagccccaggagaacgaagcccccaggcagtgagcgccgaacagcctccatcgggaggctgacaccatctcacagaagtccttacaaacgttattgcaaacagagaaaaaagcagcagatgtagcatgtctatatatttttcttaatatcacctttgaccaagcctccctgctacccttcaaaagtatccagtatttgtagaagcgagagaatggctgtaacacggaacactgcttttcacgctaaaaccccaaaagcgctgaaggtgcgctgcagcctggaatgttccggttccgagtcaggatcgccccgtttgagcagcggcagcaggaaccctgtgccaaggaggagaaggaggagggctgggggacacacagcccagcagggtgagggggccgttggacggcggggcttctgacctcaccaacggccagagccgagagcccgacgcagctctgccgggagcctgccgggaccgagcgcacctcacgaccagtgtctgcatctaggagaagccaagtccatccccctcatttctgcctcttttgtggggggtgggggacatgaaggccacatgatgaggtctctctccatcacaccctgcttagcaccccctgtcacaggctgatacccctactcttaccaagtggggacgagaaaacccattttaaaacactgagctagagacagcaaggagagccaaccagtccatcctgaaggaaatcagtcctgaatgttcacaggaaggactgatgctgaagctgaaactccaacgctatggtcacctgatgtgaaaaactgactccttggaaaagaccctgatgctgggaaagattgaaggcaggaggagaaggggacaacagaggatgagatggttggatggcatcaccgactcgatggacatgagtctgagcaaactccaggagttggtgatggacagggaggcctggcgtgctgcagtccgtggggtcccaacgggtcggacacgactgagcgactgaactgaactgagagacgattcgacaaagttcacagtcattcgcctcatttgatttttttcttaatcattttccaaaaaaaatgttcacttttgcatcatggtctcgtgaaataagcaaataaagtggaagtgaaacaaaaggtttcaaccaagatctctcccgttgacctggccaggcccccagccagctctaaggattggcagagcgaagctcagagaagctcagaagcatgctcaagacacactggaaacgctgcaggagctaagaggttcaggtgcggcagggccctgctgcctccagccagcagagaacaggctcgcgtcctgggcggggggctggggccccttctccaggccagcagggtctcagagcagccgggggtgggcccgtgtggacctgggcgcagcagaccctcccggtttgggcccattcccgacgcccgcctctccaccccctccctcctctgccagcccaccttcacctgcaagcccttctatgccccacagggcagtggagctcctgccctgcaccctctgctcacacgtccattcctgggcccctacccccggcccatcccctctctccccatgaaccccgctgtgtcgacgtggcttcgtgcttccctccacctggcctggcccgggcaccccacataaatggtcgggatccactgctaaccggtccagggtgcccagcgtctgttcggcagaggggcccacgtccctcaagggcagacgaccaattctggttccaggatggtctctgagtgggcaacctggccttggcccaagccctggacggcagtcagtactggtttcctcgtggacagaacaggaatgactgtgttctatctcacttcctgggctccccaggtagtaccagtggaagagaaactccctgccaattcaggaagtgaaagagagggtgacttgatccctgggtcaggaagatccgctgggggaagaacgtggcaacccactccagtattcttgcctggagaatccccatgcacagaagagccaggcgtccacgggatgacatacagtcagactcgactgaacgacttagcacacacacatgcatctcacttgctgggctcatcgtggaaaaccatgaagtaaccattaagcaccgttcagaaccacatcgctattcattccaggcccctaagagcacagcaaggtctgactggcagtaagcaagtaaccagtgtcgatctattactattagaagcttgaaacatctatgttttttgcagacacagcagccccggcccttcacagcccagcatctggggtgggcgcccagcacccacctgtccacctgcccctctgctgggcgcctcaatcactgcccttctgtgccaccgacaagctgttcgctgcggtttctaatgatcccggctcagggctttctatgtcaaacacataccggggagttcattcttaagtttcaatatcattaatcatccaacattcagcatctcggaattcaggaatttgcatttctacaatggcggttttgaaaaaggggacatagatgcaaatgttgcacaaaccgtataagagttttcagagagctgccgaaataagccatcagcgcgccattgacagagattttctccactcttcataacgactgagcattcgtgatttttaaaagacaaaacacaatttgaggatttagaggagaaaggaggaaaaaaaaaaaaaggaggctgcaaaagaagccgttatgtctccatgatttccagaacaaaccttgactgattaagatcccggataatcatggcatggaggatccgggccgcgacaattcaggagccgtaactatgcgggcgggcgcccggaggagcctggggccgcacgcagctgggagacccgcaggccgtttctgcacccgccctggaggaagcagaagcaggtgctatgagcggcccatgagcgcctccttccccaaggtcagcctaaaacaatgagcctgcccctccccacaggacacctgcttccactggtctccagagccgtggtcttgctctgttggatcgcgagtctgtttctgcgttccacaggacactgggaacccgggctcctctccctgtgtccccagcctcggtcttgtccagaagcccctgggcccgccctccagcgcctggggactggccacgcctcccagatgcgtcctgaaaaagctctcccgcctcccctggctccctgagggtgtgagcacaggtctccgggcccgagcccccaggactccagggctgcccctgctggctgtacacctgtcccccgaaagccctgacctgggcctcctggggcctcgtccgcggcctttcccggggccccagctctccctgtggcccagcgcctcacacagggcccacgacccaccaccaggggctcaggatcaaagttccctttgtgttccctacaggtcctcaaaattcatttcctccccttgaaatatactcctgaaacattccacccttgcacagcacaatctaaaagacaggaaaatgcatccttctgaggccatttctaaattgaaatataatataaccctggtggccaaccgagtggaaagaatcaagactcaagatccaacagggcaagaccagggctcgggcttgggccggtggagctgagagcctcctcccgggacctgcaggatgagaacttcatggaggtcggaagaaatcaaactgtgtcgaaactcatcaatcaccaagttactgttgacgcagatattcagctgctttcatgtggacgaggcatttcagagtgacgagaatgctgacaaatcagagtgtggtccaaactaaaacacgggtctaaaatatacaggtttccctcaaaatggctcatcttgtgttttaacatatgcaagcctcttgccaagctcccaggagggccgggacacttgagtgactggatcccagtcctgctcggccagcttcctgtcgagagcgggcttcagatgcccgcaagcagtccagggcactgcacagcaggctccctaaggtttacagccgctccttcagacgccctctgggcagaaatgtcactgcgaggaagctgagctgctcggggtggggcgggggtggcaacaacgtggccgagggagagcctctggtcccgctctgagccaacccaggcccccacctcccagcacactcgggctacagggacgaccacagcctgtcgtctgaggaacacgaaggcagggaaagggggcagcctgtgcccggcccctcagtgtgggcaggggactcgccttccacgtggaggccccgcggcctcacagcgaccccccgccccgcacaggcgcgcaggaacgcgtgcagcgctggggcgggagaggcaccgcgtctcagcacctctcctcgctcctcctgctctcaaaggagagttctcgcagcctgagtcaggccgggccgcttgctcaggccgctcacagcattcgcaatcgttattcagagcaataaaagccccaccagtcagcagttttacgtcagagcgccagggccgggctctggcaaagtgcagaaggaacagcaataaaaccataatgcgcgcctcacccagcaccagagggggccagcgcgggggccggggagaagacctcccgtcaagtgaaaagctcgcttcctcaccggggcccagctggccggctccgcaggcctgacgggggggcccgcggcgcccgagggccacacaggctggcggggccacagccgggagggatgggggatagccagtgacgcggcggggccggggggcggccagacagacggacaccgcacggcccagggaggcagagacggacgtgggactcaagggaggctggggccgaagacgggacagggaaccccaggaggggccctgctctgaacagcaaaccgaacacgttcggtgttaactgtcctcctcccacaaatccactaaaacgacaagacacaaacaccaacgtgaaagattcacagcgagtctacacggtgggaacacagtggcgtcagctgacaagggacagggagggaccccctaggagatgcccgtctgggggatccaagtgatgggggaccaccacgagcgagcaggtgctcaccctggcaggccatgggcttgcggacggtggaggggggtgcgtgcagaccatggctcagcccagtccccagcttgcacccacccggggtggggaacgggggggtggaccgtagagcagctgggagagacccgccagcaagcccaccctcgcgtcggcagatgctactgccaggcgtcagctacccaggccgctgcaggactgccctgggaggaggggggcgtcagacagagaggaggatgggggccgggcccatccaccaagagggacacgcacagcagacaggacccgacctcagttaacagccacgggcaaggcctctgcccgagacgcgaggactctgggaaggagggaaaaggaacaccccgctagatctctgctgctcacggcgaccagcctcgaggaggaggtctgagatgcgcagatgctgctgctgctaagtcgcttttgttgtgtccgactctgtgcgaccccatagacggcagcccaccaggctcccccgtccctgggattctccaggcaagaacactggagtgggctgccatgtcctcctgcaatgcatgaaagtgaaaagtgaaagtgaaatcactcagtcatatctgactcttagtgaccccatggactgcagcccaccaggctcctccgtccacggcattttccaggcgagagcactggagataagtgggtggagaagcgttcgtcagccaagagaacccaaaggcagaaacacttttaggagactgataaattctggggcaaagaggcacgaaacagagagaaacacactgttattttgttaagagaccggggccagcaacacacattcattagattttaagcactgaaaaacaaagccacaaacgtcttattgtaaaaagaataccacaaactataatcataagagaaagtacacgtttctctagaaatcaaagagacaaagaagataaagctatgctgatgtaataatttaatcactgatttaagcatctgaagttattatgtatagataacacatagagaaaaatgcatacgtacactcctgtatataaatatacttgacctttgaacagcatgggattgaaccaccacacaatcttcttacagcagggttttttacggttactaccacgcacagcaccgcagcatctgtgactggctgaatccacagacttggattcacagatccagagtagccaacttccgatgcggggaccaactataacccacacatggattttccactgtgcggaggcttggcacccccgactcccaggctggcccagggtcaacggtacataacgctcatgcaggagaaaacttcacacacagtcctgatgcagacacatagacttcattagattaaagaaagagcgagaaaaataaatgcggggggggggaagcatttttttctcttcaaatgcctactggcatatatgagatttatgtctacagcagctcataaaaaatctagtatcacctcacactggtcagaatagccatcatcaaaaagtctatgaacaataaacgctggagagggtgtgaaaaaggcaaccctcctacactgtttgttggtgggaatgcaaattggtgcagtcagtatggagaacaatatagaggttccttaaaaactaaaatattgacataactactatatgacacggcaatctgtggacgtatatctagagaaaatcgtaacttggaaagataccagctccccagtgttcactgcagcacgactcaacagccagggcacgggagcagcccgagcgtccgtcagcagagggttggataaggcagatgcggggcacacagtcagtggggtatcactcagccactgaaaagaatgcagtgacgccattcgcagcggcaaggatggacctggagagtgtctcactaagtgaagctcagtcagagaaagacagacatcacatgaacttacttacaaagcagaagcagactcacgaacttagaaaacacacttatggttaactaaggggaaaaaggtgggagggataaactaaagagtttgggattaacagacacacactactatacgtaaaatagataacaacaaggtccttctgcatagcacaggggaatctactcaaattctgtattaacctaagtgggaaacaatctgacaaaaaacagatatatgggtgtatatgtatatacacacacacacacacatatatataaaactaaatcagtttgtacaccaaattaacacaacactgtaaatcagctacactccaatataaaataaaacttttcaaaatgtgcaccctcatttatacaataatgcaaattcaaacaataaatgtcccctggcatgctgagaagaatgagacaaactgaatccacctagtgccttaaggggagaaactgagacagagtaaacaaagtttccagtgcaggtgcccgcccaccgagcaattctactgcctggaagtgatccagcagagatggtcacagaagtgtgcgaacaaaacgtgtgtacgataactgtctgaggatccggggctgttctaaaaactgctgcagccacataagtatctacccgtgagctaccaaaaatgagtcagggttacgtacctactgacatcaaaagatgctcataaggagctaaatgaaacaaacaaacaaacaaacaaaaaaacaaatgaaacacagaattccagagagggatgattaccctctattaaaacgtttctacacatacccttatcttcagacacaggaggaaggcaggctccccagctctgagtggaagggagtccacgtccacccacttcgacccagactgttaaattatattctacactcagtatcaatcaatacatgaacaatctaaatcaataaagccttcgtatctaaatacaagcgggaaccctgctcttggagcttcagacaactctgttcagggcaggagaggacatgcaggggtccgatccccagggaggagagcagaccaagccccccactctcacccagtggggaccccagccacactgatggaggcccgagtggacgcaggacgacagtgtaagcggcccaggggccacgctgcagcggatggtgaggctggacgagccagggcttgctgccatggggcggccaggtgacttggtgacagggctggagaagcctgagcgctgtgtccccgcacgcttctgaacctgagagccgcacaaacgtgctccccgatcccacccggccccgagctctgtggccctggaccagtcacctcttcccagcaggtgggggacattcgggcctgtgaagactcgctgcgtgtagatgcaagcgccatgcctggtaaagccctgggcaccaggactgatgcccgcaggcgcccaccaccaaggggcaccaactgtgtccagcccaggggcagtccacccccacggcccccaaaatcaaagcagagggagaaggaagcagctctccagaccacacatggccttgcacccattgcctccctgaggtgccagggaggcgcgcgctgcccacatcggcacgtgggtcagggccaagcctggaccccgacccctgagaggccccactcatctttctgccgctgagatggagagctggctgcctgacccttggggccgacctaaaccagccacgctcgtgatcatgaacacagagacagacccaggacccaaccgccacgaggacccggggtctggcttacctggatggctttgtgagctcattgcgagcagcggcttctccttcaaaagattcaaaatggctcaaaacttccacgtaaacgagagctccaaggagcccggagtccgagcggcacatacaagtccagcaacgggcagggccggcccacagccaccgaagcacccgggtctcgctgcccacgtcgtgggcccagaaatccagaggagggtggggatctccaggggctcttaggagacaacctgtgtgggcagagaaacgggcggcttcggttaggaggtgcagccaggacccagtcatgtgcgtgctccccgccccttcggtggactgctaaacactcgcgtggactcccgcgtctagtcctacagactagagaagcccttacgtcccaacgagctcccccctgagagcccgttcataagtctgctttgttcataagcccaaccgagttcatctacatacccagccttacagataacgtcagacacgtgaacgaacttatgagacttgacatgggaacacacat

SEQ ID NO: 131 - DNA, 19253 bp, Hippotragus equinus
  source 1..19253: mol_type = genomic DNA
aactgtctcaaaagcaattttttccattctttcctccatagtaaggtgatgttcttaagtaaaccaatccattcacaaatgactctctgcatctgttctggtgtcttctgctacatcactgccacagtcatggcatgactgagaagagtttccttaaagtcattaattatttggataacctaaagctgccctattacctctgggctcttatcctctcctctttacacagtcagaaagtgaaagtgaagtcgctcagtcatgcccaactctttgcgacccgatggacagtagcctgcaccaagctcctccgtccatgggattttccaggcaagagtactggagtgggttgccatttatacagtcaagtccacataaaataggaagctaaagatcctcttgtcaatccatatccaagtcttccaccaccataaactccttttccttctccataaccagggctaactcccaaattgccacttcctggtcatcctccatacctattataaccatgaccaagtccactgaccacttctcaatccatcagatcgtcctccaaagctacttcctcgtcctgaccctggtccaacatttccatcatcaccaggagaatctccaaaaccagctttgtctccctctccacttctagaactctggacttgttgccttttaggtcgagaaaaggcctttcttacttctgcatgatggccgttgatagtatggtttttctgcaacacaatcttatccacgggatcatggtcatcaaaagtcacaaatgcaaagcctctttttcttccagactctctatcagtaattatctcaatggcatcgatttttccatatttctcaaagtaatctctaagatgatgttcctcagtatcttcaattccaccaacaaacagcttcttcacagttaggaaaacccctcgctgcccagattcctctcttgggacagcacgtttgggggcaattactttcccatcaatagaatgaggtctggcagccatggcagcatccgcttcagccatggatgaaaaggtgacaaaaccaaaccctcttgatcttttgcttgcagggtcccttatgatctcacagcttataagctttccccactgcttgtagtaattcctcagactttcttctgtggtttcagagctcaagccaccaataaagagtttacggaattgttcttgttccttcttcttcctccaagaaataacagtttggaaactttgctcgatctcggactccatcactgcagccattttcctggtgagggaaggtaagggagatgagggagatctctgggaaagctcagcaacctgactgttcacaatgctgaggtaacaagaaactagaacctaactcaccccaggtctgaggggagaacattctaagagcagcaccttcacaaccacctggtgccaccctttgaaattcttgagcacctttcaattttcctgcaaaacatcatttacatgaatgatttttcctgatttaggaatccaaattaatgttacactttctattatttttttcaattttagattgtacttatattactatcttttatttcatactgtttttctcactaaattggatatccaatgaagacaagattgacctagactttaatgtttaacactgacatatagcaacatcaatatgtttagttcttaggcaatgctcagaattttgagcgaaaactatccacaccaaaaaagaaaaattttctacattttcaaataaattcactatagttaagcactgataatctcttgtggtggactggcaatcatatcttttcaaatcatttttctctgtgtaatctattttaagactcatgttgatgtatggcaaaaccaatacaatattgtaaagtaattaatctccaattaaaataaataaatttatattaaaacaataaaaacacacacaaaggaaaaaaaaggactctagccacaataatctctttaagatgtaaagctaatcagtgtacactttctttgaaatttctgtcacattggtatttttaaggggagaaaaaaatcaaattccattcctgctgttctgccataattattaacactgcctcttaaacactcaagatgtttgagtctggagggaaagttagttgatcctctcatttacagaacacctaatattatgccaagttgtggactaaaacccaggattcgtaattccacttaacaaagttactgccccaatttactttaatcctgatgacatagaagtgttaatagactaaagaatgtctactctagtgcaaggtatgaataaggattctgacaatcagtaaggccaatgcagagataggagacatagagcaagagcagaaaggcaaaagggagggagaattaactacaatttcagatgatgatgagattatgggaagtctgactcctgatatctgagcaaagaagaaaaggatgggggtagagttccctgggggtccagtgtttaggactcatcactttgactgctgtggcctggattcaatacctggttggggaactaagataccaaaacataaagggaagaaaggaaaactgggaaaaaaacattgtaactaaggagttttgagatagagagaacaatttatgcaacacagggataaacactactttgctttccagggacgttgattttaaaacctaaaatgttggggcttgcctggtggtccaggggttatgaatactcctgccaatggaggggacacaggtttgatccatagcctgggaagattcctcatgccatggagcaactgagcccacaccctagagcccttgagctacaactactgaaccccatataccttagagcccatgctctgcaacaagaaaagcacatgcactgcaactagagaagggctgaaagtaatgaagacccagcacagtcataataaaaattaaaatctaaaatctggactgttattcccaagaaagtctcatatacaaagatatgtaaaaccatgaatcataaataaaaataaaaaaactaaaatctggactactatcccaagaaagtttcatatacgaaggtatataaaactatttcttaatactgctgttgctgctgctaagtcgcttcagtcatgtccaactctgtgcgaccccatagacggcagcctaccaggctcctccgtccttgggattccccaggcaagaatactggagtgggttgccatttccttctccaatgcatgaaagtgaaaagtgaaaagtgaaattgaagtcgctcagtcatgtccgactcttagcaaccccatggactgcagcctaccaggctcctccatccatgggattttccaggcaagagtactggagtggggtgccattgccttctccgccttcttaatactaacaccaaggaaataacttcaataaggtagcttctttttttaagagtaaaatctgctaacttaagaagagattttaccaaagaaaaaaggatacaaaaggacattcttgccatcaataaaaatgccacacttaccggaacagtctgatttgtgaatactggttctcccagttccaagagctgtcctgtgacccacacctgagaaggcaaccagtagcttgctggagatagtagcgacttctgcctctgattacccttttatagactaacagagtggataatccaatcggtagataacccagacacaccctattttagattaatgagattgaagagattctaaaagaaaaaatatggggctattgatatttgcataatgtcctagatgaaaaaaatgtaatatgtttgtacatggggagtgttacttagagtttatgtcaacattttatgtttcctttttctcccgctatggaatatattctgcaaaaataagaatggaagcttcttgatataaaacttttcagataagatatgctttcataggaaaaaatagagactgtttaatgtttttcaataaaaaatgtcaaaaaacttattgacaagactataatatctatatcatacagccactacaacaaaattagtgttttgggcatttacatttcacctaattactgaaatttgaaatgatcacaactgtattgctttttccttaccctttgacctaaatagtctctttactcttttcacttcacttttattattccaggattccctaataaatttgttaatcctaatcatatacaaatctgggtataattacatttgtgattaaattatgaatctttcacttaatagtctaatacacttaaagtctaatactttcatcgcctttgccaaagtctaaaaccttagaacactttaaattccattacactttcctgagtgttttattatttctgcaatgcattttaattctatctatgttttaatttccatgagatgttatctgttactgctgtttagtcagtaagtcatgtctgactctttagcagagatataactagttctttataaaacaaaattaaatttatatttatttcctaatcattgtttcctttcctcctcattccatcctgcattcctaattttcaatctgggattattttccttggggcttaatatctcactctagtattttgtctaattcaaagctgttaacaatgaaatatttcactttcagtttttaaagacatctttacttggggcaacattgatgcttgatatagaattctggtttgatatgataattatcacactttaaaaatagtgttctgttagtacttatcttattttgtttcaatatcagtgtcaaaaattaagctttttcttgcatgtttggcttctgtattctctacagattcattgggttaattttggcttttagaccataggatagcttttcattgtttcttctgcatatacttgtgtaagctaatgttgctgcattatgtaggtggatgcctttcaccaatatgaaatgtgcttttgtgactgaaagtggggtccagctatttaccattcaaaagccactaaagaggcaaggttggtagaaaggaaaatttgctttattatgaataccagaaatgggggtgggggagagaggacgcctatccaaaggccgacttctgacctcatactcagggagtactagcttttattgacagagggaggctacatgcagaaacagcacggtcagctctgacagtcatcttgaaattggtcatgcagtagtgtgaccagtgtcatcttgattgttttaagttgttcagttcagttcagttgctcagtttgtccgactctttgcaaccccatgaactgcagcagccaggcctctctgtccatcaccaactcctggagttcacccaaacccatgtccattacgtcggtgatgccatccaacaatctcatcctccatcgtccccttctcctcctgccctcaatctttcccagcatcagggtcttttccaatgagtcagctctttgcatcaggtggccaaagtattggagtttcagcttcagcatcagtccttccaatgaacacccaggactgatctcctttaggatggactggttggatctccttgaactccaagggactctcaagagtcttctccaacactacagttcaaaagcatcaattcttgagtgctttctttatagtccaactctcatatccatacatgaccactggaaaaaccatagccttgactagatggacggttgttgacaaggtaatgtctctgcttttaaatatgctatctaggttggtcataactttcctttcaaggagtaagcatcttttaatttcatggctgcaatcaccatctgcagtgattttggagccccccaaaataaagtcaaccagtttacactgtttccccatctatttggttttaagtagaattagtctttatccctggagaaggcaatggcaccccactccagtactcttgtctggaaaatcctgtggacggaggaggctgtaggctgcagtccatggggtcgctaagagtcagacatgactgagcgacttcactttcacttttcactttcatgcactggaaaagaaaatggcaacccacttcagtattcttgtctggagagtcccagggatgagggggcctggtgggctgccgtctatggggtcgcacacagtcggagacgactgaagcgatttagcagtctgtatcttcagagttggtttgttcccatttccttgaggcaaattcccagaattatgtcagattatgtcttggctatagttaacttctttcacatgttgaaagtttcagtatctagctcagagggtgcattcaaaatgtatttatagaacttgaggaggaattaaaagactcccttgtagctcagtcagtaaagaatctgcctgcagtgcaagagacccgggttcaatccctgggtcggaaagatcccctgcagaaggaaatggcaacccactccagcattcttgcccagaaaatcccacggacagaggagcctggtgggctgcagttcatggggtcgcaaagagtcgggcatgactgaacgattaacacttacttatttacttgcttaatgactaaactaaattacttattcttgttggactcttttcctttattcctgcattttctcatttctctgcttaaacttatttttgactaaaatttttccacagacaaaaggcaacctgaggacatggggggaatggtgaagcaccataaggtcttgctctgtttcaatatcaatttttccatactttctctctgttccccttttaatcatatctctcttccattttaagtctgtattatttattatttttcactctcagtttctgttgaaatatttgctctgccttactctttagtaatccaggtaaaaagtgtagaatcaatatcttcttaattaccaaaatttttagtttcatttctagttcagttcagttcagtcgctcagtcgtgtccgactctttgtgaccccatgaatcacagcatgccaggtctccctgtccatcactaactcccggaattcactcagactcacgtccattgagtcagtgatgccatccagccatctcatcctctgtcatccctttctcctccagctctcaatccctcccagcatcagagtcttttccaatgagtcaattcttcgcatgaggtggccaaagtattggagtttcagcttcagcattagtccttccaatgaaaacccaggattgatctcctttagaatggactggttggatttgcagtccaagggactctcaagagtcttctccaacaccacacttcaaaagcatcaattcttcggcactcagccttcttcacagtccaactctcacatccatacatgaccaatggaaaaactgtagccttgattagacggaccttagtcggcaaagtaatgtctctgcttttgaatatgctatctaggttggtcataactttccttccaaggagtaagcatcttttaatttcatggctgcaatcaccatctgcagtgattttggagccccccaaaataaagtctgatgctatttccactgtttccccatctatttcccatgaagtgatgggaccagatgccatgatcttcgttttctgaatgttgagctttaagccaactttttcactttccactttcactttcatcaagaggctttttagttcctcttcactttctgccataagggtggtgtcatctgcatatgtgaggttattgatatttctcctggcaatcttgattccagcttgtgtttcttccagtccgacagacagaataaaaaactttgatttttaaaaaggaacagttttacaataaggccatatggtgaaagaaaaatttcactacttctctactgacttgaataagctctatgataatcttagtttgacctcataggttctaacactctcctgccctacagaggaggaactagtaatgtaagtctgaggtctactcagagaagagggttttttcctcctcccccactttcctttgattacaaaattgtggcccacttaatccttggggcagagctcccttgcctgcttctttgcattgcttataagcatcctatattaataaatctatttattgcctatcactttgcctcttgctgttcctcttcctgagttccttctgcactaagatatgaagaatctgagcctcagtaagaacagacaccaggtgagtcattctaattaaaagaccatgggttcgagttccaatatgaggtacacagtttcaggtgtgttcttgagggtgtttctggaaaagactagcacttgattccatagaccaagtaaataaatccactttcatgaatgtgagtgggtgttttgctatttggtcagggcccaaatggaaaaaagtgaaggaaggattaatccattctccctcactggcacatccatattttcctgcctctggacttcagaactcctggttcccaagcatttggaattggaatcaagtatactgctgacttttctggctttctagtttggagatggtagtttctgggactttttcatctatcaagctactgagtcaattcttacaataaattttcatatatatagttctggtaagctgttttatgttttaaaacataaaacaaaatagatttatgttttaaatggatcattgtgcctggaatctatacctgaattaatggagaaaggattaggaatcttaaactgtcattgctaatctattagaggaggtcattcaaaagatgacatcttgcaaaagtatggttagtggatggattttcaatataccaaaaagtaaagatttaaaaatttaccaatttgtaaattggcctgggtttggatagtaattatcagatttccctctttgtctcacaccagctttgtaatgtccctaaatccttttctcaatgtataatacctgtaccagcattatcaacatcaactaggaacctcttagaaatgaaaattctccattcccacctaagacctatgtggactgaagtccagaaatctgagttttagaaaccctgcagctgattgtgatggcacgcttatccaggacagaaaaatgatagaatatccgaataagctgagacattcaccatggataatagtgtttgtccctcagtttacttaaactacatattttaatttcaaaaagaaagctcaagaaatatgcctcgacttcacagaggaaacaatgagactatgaaataggtcaagcagaaaactggcttcagctctagctaccctgtaaggcttgtatctgcattgtatctgaaattacatgttccagaggtcagtgacaagaataatttcccaggatgacagtgagttcaggaacagccaacaggagatcaccttggagatcaagagacttcaaggactacaggttgcagcagtgaaggagaacttgtatgtcctttgtattttacaaataccttaacaacagttgcaccaagtagtcctgataaatcctttggccagtataagggtggatggaggtctgcatactagtcctaaaaaagcccaagaatgtccatatctatcatagatgagcccagaaacagaccaggttctcttgcaacctctctttaggaatcaggaaaattctggagatgacaagaaacagaagcagactgtgaagaaagcagaggagagactgccactagccttgaggacagatgggattgccagggaagaagagaagaatatccaagaaagaccctagaaaacacagtaagaaaggcaacattcatgctgaagaaaaggaaagtggtacagaccttgagcaattcatcttatgatgtatctgacctttcatcagctactccttgcaatgtccatcatcatattcatgtttcatagtgaaaggctgttgctgaaccatgaaagattccaggattcttggcctccagaggagaagaattcaatctgaggccagagatgaggcttgatagctcagagcttttgtgtaataaagtcttattaaagtataaaagagatagagaaagcttctgacacagacatcagaagggggatggagagtgcccccctcactagtgttagcaagggagttatatactttttaattagttattgcaatgaatcaaaagaatgtctggaggttgtaaagatcttactagacccactcccataatttacattttaagataacaggattagccagaatgttttcaggaaggagaaactgtcctcaagcaggatacattgttgttatataatccttagcaccagtttaaactgagttgtttgttgtgtaatcatcagttccatgcttaaagacaaaaacgttttatgtgactaagactaaggaatgtagaggaaaaaaagaaatttgtccttttctcctccttgagaatcccacacccctctctctttagggaccccccagacttcttatcaatctgcctaggcattgactcactcgacagaaaactcaatttacattttccttgattggttttcatttttatattaaatcaataggataattgaggctgagattttacttactgatttgaatttacatttctttcctctagtacttacactcaaagaagagatatctactcaagtcagatttttcctttctgttaatgctgtattaaatctgatttcatatattattatcttcttaataataattggttttgcttgtaaatttcagtaaaatacatcaacctttcctttatttgtcatagctttattcatatataggtaatttttatattactgggggctgactgtggctcagatcatgaactccttattgccaacttcagacttaaattgaagaaagtggggaaaaccactagaccattcaggtatgacttaaatcaaatcccttatgattatacagtggaagtgagaaatagatttaagggactagatctgatagacagagtgcctgatgaactatggagagaggttcatggcattgttcatgacagggatcaagaccatccccacggaaaagaaattcaaaaaagcaaaatggctgtctggggaggccttacaaatagctgtgaaaagaagagaagtgaaaagcaaaggagaaaaggaaagatataagcatctgaaggcagagttccaaagaatagcaaggagagataagaaagccttcctcagcatcaaggcaaaaaaatagaggaaaccaacagaatgggaaagactagagatctcttcaagaaaattagagacaccaagggaacatttcatgcaaagatgggctcgataaaggagagaaatggtatggacctagcagaagaagaagatattaagaagaggtggcaagaatacacagaagaactgtaccaaaaagatcttcacgacacagataatcacgatggtgtgatcactcatctagagccagacatcctggaatgtgaagtcaagtgggccttagaagtcatcactatgaacacagctagtggaggtgatggaattccagttgagctatttcaaatcctgaaagatgatgctgtgaaagtgctgcactcgatatgccagcaaatttggaaaactcagcagtggccacaggactggaaaaggtcagttttcattccaatcccaaagaaaggcaatgtcaaagaatgctcaaactaccacataattgcactcttctcacacgctagtaaagtaatgctcaaaattctccaagccaggcttcagcagtacgtgaactgtgaactttcagatgttcaagctggttttagaaaaggcagaggaaccagagaccaagttgccaacacccgctggatcatggaaaaagcaagagagttccagaaaacatctatttcagctttattgactaggccaaagcctttgactgtgtggatcacaataaactgtggaaaattctgaaagacatgggcataccagaccacctgacctccctcttgagaaacctatatgcaggtcaggaagcaatagttagaactggatatggaacaagagactggttccaaataggaaaaggagtacgtcaagactgtatattgtcaccctgcttatttaacttctatgcagagtacatcatgagaaatgctgggctggaagaagcacaggctggaatcaagattgctgggagaaatatcaataacctcagatatgcagatgacaccacccttatggcagaaagtgaagaggaacttaaaagcctcttgatgaaagtgaaagaggagcgtgaaaaagttggcttaaagctcaacattcagaaaacgaagatcatggcatccagtcccaacacttcatgggaaacagatggggaaacagtggaaacagtgtcagactttatttttgtgggctcccaaatcactgcagatggtgactgcagccatgaaattaaaagacacttactccttggaaggaaagttatgaccaacctagatagcatattgaaaagcagagatattacttcgccaacaagggtccgtgtaatcaaagctatggtttttccagtagtcatgcatggatgtgagagttggactgtgaagaaagctgagtgccgaagaattgatgcttttgaactgtagtgttggagaagactcttgagagtcccttggactgcaaggagatccaaccagtccatcctaaaagagaccagtcctgggtgttcattggaagaactgatgctgaagctgaaactccaatactttgaccacctcatgcgaagagttgactcattggaaaagactctgatgctgtgagggattgggggcagaaggagaaggggacaacagaggatcgggtggctggatggcatcaccgacttgatggacatgagtttgagtgaactttgggagttggtgatggacagggaggcctggtgtgctgtgatttatggggttgcaaagagttgcacaggactgagcgactgaactgaactgaattatagatacatatatgaccaatgtggaaggactgtgcatccattgtgcctaattctgtggacttgagtgaaacatatggtgtatctcaataaaatataaccatatatcttctgcttttctattcatgacctgcatctgaaggacagttatcttccagggtagaatcatgggttcgtctgcatctcctggaggtcccatttctgttttcaccagaagcatttcatgaacggcttgggccactgcatacacagcattataggtgaaataactggattcagacaaggtcatcatgtcagcagagaaggcgatggcaccccactccagtacgcttggaaggtcccaaggacggaggagagtggtaggctgcagtccatgaggtcgcaaagagtcagacaccgctgaacgacttcactttcatgcattggagaaggaaatggcaacccactccaacgttcttgcttggagaaacccagggatggtggagtctggtgggcggccatctatggggtcgcacagagtcagacacgactgaagcaacttagcaaacacatcatcatgtcagaattcccttgcataaacactatagaaggattgggtgggcagtagaagatatttccaaattgtgatccagcaggtgaatatgtaataatttgaagccacacattcagttcagttcagtctctcagtcatgtctgactctgtgaccccatgaattgcagcacgtcaggccgccctgtccatcaccaactcccggagttcactcaaactcacatccatcgagtcagtgatgccatccagccatctcatcctctgttgtccccttttcctcctgcccccaatccctcccagcatcagagtcttttccaatgagtcaacttttcgcatggggtggccaaagtactggagtttcagcttcagcatcattccttctaaagaacactcaggactgatctccttcagaatggactggttggatctccttgcagtccacgggactctcaagagtcttctccaacaccacacttcaaaagcatcaattcttcagcactcagctttcttcacagtccaactctcacatccatacatgaccaatggaaaatccatagccttgattagatggacctttgtcagtaaagtaatatctctgcttttcaatatgctatctaggttggtcataacttttcttccaaggagtaagcatcttttaatttcatggctgcagacaccatctgcagtgacttgggagcccacaaaaataaagtctgacactgtttccactgtttccccatctgtttcccatgaagtgatgggaccagatgccatgatctttattttctgagtgttgagctttaagccaactttttcactctcctctttcactttcatcaagaggctttttagctcctcttcactttctgccataagggtggtgtcatctgcatatctgaggttattgatatttccccctgcaatcttgattccagcttgtgcttcttccagcccagcatttctcatgatgtactctgcatagaagttaaataagcagggtgacaatatacagtcttgacgtactccttttcctatttggaaccagtctcttgttccatgtccagttctaactgttgcttcctgacctgcatataggtttctcaagagggaggtcaggtggtctggtatgcccatgtctttcagaattttccatagtttattgtgatccacacagtcaaaggctttggcctagtcaataaagcagaagtagatgttttcctggaactctcttgctttttccatgatccagcagatattggcaatttgatctctggttcctctgccttttctaaaaccagcttgaacatctggaagttcacggttcacttactgcttaagtctggcttggtgaattttgcgcattagtttactagcgtgtgagatgagtgcaattgtgcggtagtttgagcattctttgacattgcctttctttgggattggaatgaaaactgaccttttccagtcctgtggccactgctgagttttccaaatttgctggcatattgagtgtagcactttcacagttacacattactgaagtaaaaatcttccgggtattgggaaggattaactgtcttgagcaagtgtttaaaacttcgtatgtccctcttctgaagtgagaaggagaaacctccatggaaagagtgccttatgcacttcatctcagtcaacatactatcttcctttgctgccataatccgcactctgtccgaggttaaatagagtcttgctcccctgtctatggaaatgaagcatcccatatcaccatgtagtatatacacatttacagatgaaattctgggcatcttcagtgaatgtacatcagttaattgatacaattccttaatggtagggagcttttcagtaaaagccacacatatgcttttctttaccatctctgctttcaggttccagagtaacctgcttcccgagtaacctgcttccctttcttatcttcagagaaaaaatagtgccaagcatatccagtcaagatgcaagaacagcctaatcattccatggattagatagctgtcctccctggccatctgataaatggatggaaattagtctttatcactcagtgaagaattaaaaggaccatatgtcatctgagcaagaaaagatgaacatgatttttctaacccatgcttagtgggtttggggctgtcttccttgaggaaagggtgaaccagtcctctctgctatagggagagtgaccaaattatttcctgaagggaaagagacccagtggacattctatagttcttatttcattctgggcacacagaagactgtgtttcctagatccctcactcttggaaaagacatgtagtttcttctgaaaaatgatataaatatggtacaaaaaaacaaaagagaatgtgtgagattcccatgagctttttgtctccttcaatggcagctgacatttcagatggtgcacccagaataatgtagtatttccatcaactttgccccaggtggcttgtgaagaagagattacttctacctagcaactaatgtttcatgtaaatgctgagaataagtaaatcttgtcttattaaatcttcatgatggattaaatgtactaccacagcattacctacattatcctagagattacaatgccctaccctttcatgctttctttaaaaatattccatggacaacattcttctattctatgctgctttgcttagaagtaatgtctcctgtttgctgctggtcagattggtccttggaaagagatcctaagatggacagacctgtgtggaaagtttaatggagtatcctccttatatgcctgggggacaggagcaaggcagaaatggggaaaagatctgctgaaccacaagacaattacaactgaatctcagtcagtcctcagggctctgggatgacccttcagggttgtccaatattgaggctagggaaccaggcttcttattactatgtctctaagaccctggcttctggctgttacttgagagggtcctgtcctagagtgaggggtttccctatgctgtgagtgtttcctatgatgtaaataatagtaaaccatcacactcaatgttccctggaacagtgggatgggtgccttgaccctgtgcatgaacttggactttaaagtactgactgatcatttccatcacctcccatccctgggaataacgcaccatctgaagtctctagaatgtgtttataactcagtggaatgcatacacacaacctctacattatttgtttatgggatgtgggtgaaagacaccaggaaagagactttgtttctcaccagaactcagacccactcacctgtggcattttgtacagctccagaagtgttccaatcttggctggaaatactgatgcagttcttgtaactacggccaaatatttcctctctctggcagttgtagttaggggcagtctgtttcccttcagagagccaaaacagggcaccttccagagtccttttgtcactttcaagggcactgtagagaccataacccaagggcatgttgggaaggagatgagagttcttgctgatctcctcaatggcaaagcgaaaagccaggacatattgataattcctgagaaaccacctaaacagaggggacagtattagacagaatggtcatgtaatacaggaatatatcccaagccaagggaagggaagggcttaaacccagctttcccattcagagattcttctgatttcttggtatgaataaggtctcaggggtctggaggacactggcaaggctcctgttaggaccaaacagaagccaggaagccaggacagacactcgggcaggctaggcccgagaaaagctgaggctctgggaactcccgcaggcagtgtagctcgaccaatcagaaaaatccccatagcccccgcctgcgccagacccgagccaatccagatagggatgcgaggtttaaaagtcccgcgcacgcgtatggtttaaccaatcagctatgctgttacagaaacaaccgtctgtataaaagtatatgtgattcagagctcagggcctttgtcggattccactgtgctggatgaaacctgggccctggctcgagctggtaataaacccctttatgcttttgcattgctgtggacgtcttattctctcagttttggggacttggactctgggcacaacatttgggggctcgtccgggatccctttaactgggaagaataacactctcccggtagaaggggtttcctcacttggaggaaagctatctgaacaccggtgttaagtctggttagccagcataagaccgaggcccagcttacgtgctggaaggcagctggctctggtgagaagagagctcttgtcaggcttaatcaggggcgaattagtcgtcttagccagcgtaaggccgaggcccggcatcgtgctgggaaggcggctggctctgtgaacgccttgttggtaagataacctagagggatagggttcagggggcccaggaagacctagtactgttctcggccgaggtttgtctctcctctgtttgtcgcatctttgtgtgtgccggcgttgtcactgctctctgtgtgttcgtctggtctcctgtgttctatcctgtaatcatggggcaagagacttccactctgttgttccttacgactgaccatttttctgattttaagtctagagcacaggatctatcggtgctggtgaagaagaacaaattaataacttttttgcagcacagaatggccgaccttccatgtaggctggccttcagaaggcacctttgacttgggaactatacaccaagtccgagatatcgtcttccgaccgtggatcggacaccctgaccaagccccccctccttgggtaaaaccttttttgcctcaacagggattttctacccctcaggtgttggcgacacatgtaagaaaaaaaacccaaagaatctcaaggagcctgaaccaacggcgccgctatataccccatcttacaagggaaattgttaggagaagcacactgattaaaaccgccccgccctggccaggcaccatagtaactatttgcatgagttgttttaagcctccgccaaccggaagagttcggaaaaggtttagaggagacaccgcctgtacattgcgagccacgcggcagagcagttctcctgggtttccttaccctgctgcgctccacccgggtgccctttcccaataaaatctcttgctttgtcagcacatatgtctcctcggacaattcatttccgagtgttaggcaagagcccagtttcgggccgtggaaggggtccctcttcctgcaacaaatggtgactctggtgggattcttcttcaccgagactgacatcctgaccactcggggtactcaggggccagcttgcctgccaatggaccagacccagcggccgcaactgggacacttttgtccctggtctcttcctgacgcggacaactggccagagtgccccgaccggtaagaaacaagagacttcattgatctccctccccttccctctctgtctcctctccttaacccttcctatccttctctttttttctagtcccctggtcctagacgcaaaaatctggtcaaagggccctcagccagagctgaggattggagactgatcacttcctcttggcagaaaactcaaattctggttctgatttctggtggggccgagttccagtcgtcccttctctggaagcccagggaaaagtcccgtaaggcctgggtatctgtaggtggcaggagatgtctgtaaggccaccccttttgcgccccccccacctcctctccctttttcaacctggcttcctttcctcccttgaaatctttgatgttag

SEQ ID NO: 132 - DNA, 13943 bp, Hippotragus equinus
  source 1..13943: mol_type = genomic DNA
gccttctctgattcttcccttcgtgtgcccacagtgtcctccaccgacttggaccacagacgcatgactggttagagcccaagtttccgaatctgggggcgcaacaaaattacctgcggatttatttacaaaacaaaaagcagatctctggactcagacctgttaaagaagtttgagaagactactatttccagcaagctccaggctgtcttacctctcaggagtgggtcacagaagagctcttggaaccaggcgaacctgcatcgacctgttccaccgatcaacctattctgaaaaactgaaagctactcaaggttgatcccagagccacagtgattccagaggtagtagccgcagtgttgagttcccgtggggggcagcggaggctctcaccccagggtcaggacaggtcaggttcaagttctcatcatagcgtggggacccagttcagtccctgctagccccctgagatctctctcaccctcctctgcatcggaaaaatggctgaagctagtaagcccgtgatgaagaaagcttcacaatctgttccttcggagagcagtaagagagaaaaagaacaattccgtaaactctttatcggtgacttgagctctgagaccacagaagaaagtctgtggaactattaccagcagtggggatatcttacagactgtgtgttaataagggaccctgccagccaaaaatcaagaagatttgggttcatcacattttcttccatggctgagctggatgccgccatggcggccagacctcatttcattgatgggaagatggttacgcccaaacgtgctgtcccaagagaggaccatggaaagctgggggctctcgtcactgtgaagacgctgtttgtcaaaggaatcacagaagacacgaaggaatgtcatcttagagattactttgagaagtacggaaaaatcagcgccattgagatagttactgatggacagtctggcaagaaaagaggcttcggatttattacttttgaggaccatgatcccgtggataagatcatgttgcagaaaaatcataccatcgatggtcatcatgcagaagtaagaaaggccttgtctagacaagagaggcaagaaggccagcatttgagaagtcgaggaggaggtgatgttggtttggggtattttcatggtgttgggggaaatgtgggagcaggacgaggaaggaacttcagaggaggagccggtgggtatggaagaggatgtcagtttggggatggctctcacgggtacggaggaagagctggaggtggcagttgggggcttaggcctggttacgggggaggacgaggagggtgcggtggtggagggtctgcagacggctaccaggatgagggcttcagagcccgtcatgacagctatggaggaggaagttatacaagtcgcagtttcagtgattcgggcagtcagaggcagaaaccttccaagtacgatttactgaagagtggaaagttgagagatagcaggaacacgggcgggtcgtgtactggaggaaaccacggcccaggaggcagtagaggacgtgggggttgtggagggacaaggcggggggggccttctcagtggccgtgggcttgactgtatacagaggagggaattaccgcccagaggggagagaggagctgcagatgatcaaaataacagtgctaaggaaacactcacctcagtcacgcatagatgctcagcgccacggcagaagacacctgagctagtaccgaagccactttgtgagtgggctcagtcatgtacgagcactacttcctgtggaggaaagacttaaagaaaatgcttctgaggtggttttttagcttttgaaatgttctgcctttctagcggtctctggaagagtgtagaatcatcccttctttgataatgtcccatttccaagtttcggttgacccgggaaacctttttcaagatttttctcgaagttttgaaaaactgttagccagaatcaagggatactaagacataacatcattcttcttgagaaatgtatttcatgtgtagagttaagaagctgttgtacatttaagatttaataaaataattctaaaagtaaaacagtagtggcttgtcctctttgaatgttttgcatttttaccttttaaattttttcctgttttaggatatcaaaatttgaactgtgcagtgtaatgatatgacttacatatattatcaaatgattaccaaaaaactttttttcttatgatgatgaatattcttaggacttactcccttaacaacttttgtaatatcctacagctgtgctaattttggtcaccttgttcattatagcttttttcttttttcattatagcttttaaaatgttgaataacatagcatgaacttattggtcatttgtatatattttttggataaatgtctattcagttccttggtccataccacaatttgttatttgctattgtggtgtatgagtttttgttatacattacatgttttgtgtttatcttataactggaagcttgtacctttcgacaacctttatcctgtatttccttccaccagttctctgcccttggaaaccacaaacatgatttttttttctgagtttaatctttttctttttttttttttggatttcacaaataaatatggtcataccaaaagacaggtttggggaggacagagatgtgagtgagcaggcggtttgccatgtgaagtcaatggatatcgtcctccagttggcttttatgcacttatttccttataagtccctactggaccatgagcatcctagagggcaggtccatttgatacacacctggctcatgcataggaaggcatgggaaatgggccagatgagaaggaaagagagaagaaaacacacacacaaataacagaggccagggcccaggagcccagggtgctccacgggtctgagagcctctggcagggacaaggtggaggtcatggggccagtccactcacagtgcgcctccagcaacccctcagcggtctgcccagcagtgcctcaagtgatacatctttcttctcgtttctcttttgtttaaaaaatcaatacaccattcatgtaggccatggtgtcagatcagagacctgtactttggaagcgaccattttggtgccatttctattttccataattgtttccttgttgctctctgtttgtcaggagggaccggcctttgaaaaatgccagcttgtctgctgggcttaggggagctggtgagggcttccaagggcacaggcaagggtgggagaggagctggaatgaggcatcccagggagcagggggcctcttttaagaccatggggtgtggagggctcttaggcttcttttccatcagtccctctctaccagagaggaaagtcagtgatttttgtttaaagatttatttatttattggctgtgccaggtcttctttgctgtgtgaagtttctctagttgcagcaagtggggctgctctctagttgcagttaagtgggcttctcactgcagcggcttctcttgggctccagggcagtgggcttcagtagctctgacgcgtgggcttagttacccggcagcacatgggaccttagttcccagagcagaggctgaacccacatcccctgcatcggaaggcaggttcttaaccactgcaccatcagggaaggcccgaggccaaaggctggctgcgcttcccaggtggcactggtggtaaagagtctgcctgccaatgcaggaggcatgagacgcacgttccatccctggctcagaacgaccccctggaggagggcaaggcaactcactccagtattcttgggcttccctggtggcttagacagtgaagaatctgtctgcaatgcaggagacctgggttcaaccttgggtttggaagatcgcctggaggagggcatggcaacccactccagtattcttgcctggagaatccccgtggacagaggagcctggcaagctgcagtccatggggtcgcaaagagtctgacacaatcgaagcaacttagcacgtacgcatacatgagaccagctggctctccctcaggggccaagggtctccctagctcctgacttctaatccatgcatggctcctgtgcatacaggctccaagatttctgtcttctcttcagagaaatgatacgactctcaactttgcattggtgcctaccaaaggctgggtgctcagctaagccttggacatgcagggctacctcactggccccccacagccactccaggaggtaggtgcccaggtccttggttcatatgtgtggaagctgcctgaggccacatagctagaaagaggtaggcctgggattcaaacttgcagggggccaattccaaccctcctggccccaaaccgtgctgcttcctattctaggctccttctctgtctacctcaagttcaagttcacttttcccattgtcaccagccaccaaattactggagggtctatatttggttgggcccagaggcccttgggttttatcaaatgggtctctcacccactacagcaaacacttcatttccatcaagcagcatccacaagcgaaatgattttctacctccaagcaccgatgtcaagagagccctcccgacctatggcagctcctgggacttgctaggcaagcatccctgagaggggcctcatgttaccttggatgcagcctcggtgagagggcttgcatctcagcaccagggatgcctggctctgagtcctgatctgccacgaggatgaggcacaggctccagtagccacttcttgtgacattcttcacaggagcaatgaaaccactgtgccccttaacgtttaataccggggcttccctgatagctcagttggtaaagaatccgcctgcaatgcaagagaccccagttcgattcctgggttgggaagatccactggagaaagaataagctacccactccagtattcttgggcttctcttgtgactcagctggtaaagaacctacctgcaatgcaggagacctgggtttgattcctgggttgggaagatcccctgcagaagggaaaggctacccactccagtattctggcctggagaattccatggactctttaggccatggggttgcaaaaagttggagagtcccttggactgcaaggagatccaatcagttcatcctaaaggaaatcagtcctgaatattcattggaaggactgatgctgaagctgaaactccaacactttggccacctgatgcaaagagctgacttatttgaaaagactgatgctgggaaagattgaaggtgggagcagaaggggatgacagaggatgagatggttggatggcatcaccaactcaatggacatgagtttgaataaactccaggagttggtaatggacagggagggctgccatgctgcagtccatgggatcacaaagagtcggacatgaccgagtgactgaactgaactgaactgatgtttaataccagtggcccctggtagaagagacattccctgggggccggacccagggctgatttgcttgtggctccgtctccagagtacgtagaggctcatgataaatatttgttgaatgataactttctcccctctgggcctcagtttcctcatatataacatgaatagcaatgggtggagtgacctccaagtcctgctctcctggaatcctatgatgccaggatcaacaagcaacaggatcaggtccactggaagaagagggagggatataaataaataatgaccacgtttaaaattcacttttcattactagattactttctgagaacagaaaaagagcagggctgtagaagagaagcaaagcagaagagatgagcccagaaagggggggcttgggacacagcttaatactaacaattaacatgtgcactgcactttacagttgaccctcctctttctcctccactgtcctgtctgagctctgcagtgccctgtgcaacctggaaagcaagtgcaattacggtcccatcgcacagcagaggaaactggggctcccaagggttcgctggagatgcaggttggatccttgggtcttgccttggaaattccatggacagaggatcctggtgggctacagtccacggggtcacaaagagtcagacacgacagcaactaaacaacaacaacacaaaaaactcattttctttggaatcctaattctgtaaatacagccactaaaatcctcctgcaatgcaggagatgcgggttcaacccttgggtcgggaagatctcctgaagaaggaaatggcaactcactccagtgttcttgcctggagaatcgcatgaactgaggagcctggcgggctacagtccatggggttgcaaagagtcagacaggactgaagcaactaaacagcaacagatgtttagctgctaagtggcagagccagaatctgaatcagggtttctgactgcaaacgcagccctcgggcagcaggccggccacatctccatttcatggaggaacaccgcagttcctgcagaagttcatgaggtcaggggccttggcaggtgctccccccaaccactgtggacattcccctggaacaccctactccccccagcagctgctgagctggcgaaaccaaactgggcacccacccacccatcctatttacagtaaacccctcccgattgcagaaatgggacctgaaactgcctgatgacagcagaaagtgtgagagtggggtcaacagggaaggaggctggcctgccgggcccgcagagagtgccgtcagggagaggcccctctcatctctggggaatgggacttccgctttggacggacagcaggaggctcccggcacccggtcccactctgcccagcccagcagcctcagaggatacaggctcccaggtgaggacggggcttagcaacagggggaccggctggcaggaccagtatgccggagggtggtgcttcctgagcatagggccccacatcctctgtctctgagccgcttggagggttggactctgagggttcctgcaccccatcccagacctcaggaatcaattcctctgggaggtcagctccagagtctgctgccacctggggccccgggcaatggggaggcatcagagtaaacaccgagactggagctgagccccgcttctgcctctcaggagctggcaatctgggccaagtgacgtaacctctctcaccctggatcctctcgggggataacagaacttttcaggggtgctgtgagccctaaaggagatcagctcagcctctgcttagcacactgcctggctcagggtatgtcagaggcagaggtgaaaccagaacccagaatcccctctgcccacccagcctttctctgacacctgccttctcctatttcctcgcagtctggtgagaaatctccgctagcctctttcaagggggaggtgggatgatggcaggtggaattgcaatgagttattagttagcactgacacagctcaactctgcttgtgcaggagggtgtgtggtcggtcaggcactgtgctagagaccgagttccttctaggctccatctcatgtaatcctctggcagccttgtcaggtggaaataaactttgccaaaggctcagggaggttaaggtactttcctgaagtcatgcagcaaggtagcagcagaaggggagttcaaggtcaaactggcctgactccaagtcagggggaaaggggctgttggagctggaggaagatggatgatgccgggaaagatgtggggagtgaggctgatggtggtgatggatgctgaaggcagagggtggtcagatctgctgagggttaagtcttggcccaagtctaagattcagtggcccctgaaacaggccagaacccagatcgccccacttccccaccccacctccagcttcccgaagagacctgagtctcatcatcaaccgctatccctaccccatcactctagcagccaaccagagctccccccactcctgtgctgcctgtacctgacagaccccctccctgagcccagcctcccaaagggaccaaattctttctttagtttcccaagcatcttctgcggtgtcctgaaacttggggattcccagatgatggtgataatttttaaatagctaatattcattaagcatctctaattcaccaggctattgtgagccctaactcatctgtcctcccaccaaccccatcagtcactgcttagcatgctgcctggttcagggtatgtcagaggcagaggtgaaatcaggacccaggaccccctccgcccacccagcaatttctctgacacctgccttctcttatatttccttgcagtctgatgagaaagctcagcagagattaggcagaggtcaggattatccccattttacagaaggagaaactgtttccagagagaagccacttgcctaagacccatagctaagaaggagcagaagcctggtttggaccctcttgggagcagtgttcctctccttgtgaccctccaggcctctcacctttggtgacacccccaacaacagcagcaataataataatgataatatcagccatcacggagcactggccccgcctccagcactgcactgagcacaggccatgctgtagctccttgtatcaggtcgtttggctccaaagcctgtgttttaacccccaggtagagaggcctctgggctttctcagtggctgagcagtaaagaatctgcctacaatgcaagagccacaggaaatgcgggttcgatccctgggtcgggaggatctcctggaggagggcatggcagcccactccagtattcctgcctggagaatcccatggacagaggagcctggcgggctacagtccacggggtcgcaaagagtcagacaggactaagcaactgagcgtgcatgcagagaggcctcttaatgaaacaccccatggggtttaaacccagtggaagtgggtttgaatccccagccgcgtatggctgtgtgaccttgatcaaggttcccagtctctccactgcccagtttcttcatctgtgaaatgaaaaagcaggggtgctttctcagggggctgctgtaaggagcaaattaaatgaaaggacgacctgtaaagcatttggcacagagcctggcacctgctaagtgcccaatgcattgattattaaggttgtcaaactgtcgtctgtaaaacctccggcaagataaatagaatgccagcctctctcgggagcatgacagcccaagctggtcactcgtggccctggtcacatccatctttgcagtccctctttgcctggtacctggcacagcttccagcctcactcaggagtctgaaccatgaactgatcaggaccagaccaagggggctagggctgattttctgagcacacaagcccaaatcagcaggtttttctggtctcaggaaggcctccaggtgccaaattctgtgttggtacaggcactgtaaggcaaaggagaccacagcctgaccacagccctgccattaaccaactcactggacgatttaggaagggttgtttcctaatgtttgcatctcagtgttttcatctgcaagatgggaaaataatcacaacccacttctccagagtgctgtgaggatcagacaacagcagctatgggtctgaactagagcccccaaaccccgtgactctttcccagccatggccttgcctgggtccccatggttatgctgggagatgggctgggaccactctgctcgcctatctaagagcaggagagtgcccaggttttgtgggctgaggggtaatgagggaaggcttcctggaagagaaaggttttgacaggagccttgaaagatggggagaaattggatatgggcaaaggtggaatgagctgcctcagaaggtaatgagcttcccatcactgagatggtacaagcgctgaatgggaagaagcctgggcagagatgttgttgaggagacttaacagtaagctgagggttcctcaagaagttaaacacaggattaccacaagacctagtaagtccactaagtatatacccaagaattagaactaagtattcagacaaatccttgtatgtgaatgctcacggcagtgctactcacaataagcaaaaggtggaaacttcccaaatgcccatcaataataaatggattaacaagatgtaatatgtccatacaatggaatattattcacctgttaagaaggaatgagatactgatccatgctacaatgtagatgaacctcagaaacattatgctaaatgaaatgtcagacacaaaaagctacatagcatatacgattctacttctatgaaatacccagaacaggtaaatccatagagtcagaaagcagaggagtgggttgccagggactgaagcggggagggggatttggagggaactgactagtgaataccaaatgttatttgagggttattgaattgatggaaatactttggaaatagacagaggagagggttatacaatgctgtgaatgtgctaaacaccactgaaatgctcactttaaaagattaaatttgtgttatgaggatatcaactcaatttttaaaaaggaagaagctaagggttggatgagatgagttttaaggtcccttctgtcctgagaagtgatgccatgggcattggccatgctgacaagctcaagatgccccagggtttctgtctcattccccaggattctcaccagggcctagagcctttggagggacctgagaatattctaccagaagaggtggcctgctgtgctggcaaggtcactggcttcagcgccacacaggcctgggttcaagtcctggccgcagtccttcctgtgtgaccctgagcaagtgacttgacctctctgaacctcagtttcctcttcagtatagaaacattggttcttccatgcaggggtgctctgaggatataactgtggaagaagcacaagctgcccaaattcagaagctttaatgactgagaacccttggaccaaaatctcaaactacagcaatcaagaccctgacctccctgccagttctccacactccagacactgtgcggcctctgggcctttgccttctgtcttttcctcctggaacattcttgccccagacctgtctgatcctttgggtctcagcctaaacatcacttctcagagatgcctcccttgtctagaaaactcttctggcaggagaacgcccctcacaaaaccagccctcggggctccctttcatttcatttcagccagagcgctccccgcagcgtatgaccagttccactgacttgcatgttgacctgtgtctagtcccccagaccgtcagctccatgaaggcagggaccatatctgtcttgttcatcacggtatccccaacacccagaacagggtccggtggatgagacactcagggaacaggaacaagtgaaggaatgaatggccaagaccaatcacatcgtcttgtcccccaacagggagcagctgagacagggccgcgatgaagacccctcggggcagcgtgttggtgctgttgctcctgaatctgctccgtgtctcctgggcccagagcaactgcatcggaccgtccatccctggcatcccaggcattcccgggaaaccaggccccgatggcaagcctgggactccagggacgaagggagagaaaggtactgtggacactgggaacgcacgagagtcactccccaaggccccatcgcctgcctcccaagtcagcggccctccttagagagcacaaaacacttgcaaagccatcagcttgctgagccattcacagtaagcttgcaaggaagggattctgattcccactttacaggtgggaaaactgatgtccagaaaggctactgacttgcccagaggagcccagtaaatgttgaaagtaaagtgttagtctctcagtcatgtcccgactctgcagtcctatggactgtagcctgctaggctcctctgtccgtggaattttccaggcaagaataccggagtgggtcaccatttccttctccaggggatcttccccacccagggactgaaccctggtctcccgcattgcaggcaggttttttttttttttactgtctgagccactggggaggcccagtcaatgttgcagctgaggccaaaccgtggctgtcttaccactaaatccgcggtggctgcagagtcctgggtgcctccagggtaggcggcttcagccctctgcactgctctttcctcacctgtaagatgaggatggtgctcctttgcagagttgtcaatgggtttaatgaagctgcctgccccttaaaccccccgtgacatgtatgtaattcacacatccatttaaccacagccagctactctcatcacacaatttcagcaaatcctcacgagcccgcaaaatacattgtccccattttccagatgaggaagctgagccttgggcaatgtgagtcagtcaaggggacacgactaagaatggcagaggtgatgtgagaaactcacctgcgtggcccccgagcccgcattcacagtaaccagactctgccactctcctggaagagaaggctttatatcttgtgccaaaccaaggaggggtttggagtggtggagtgagaaaggttcaaatgcccacttccaggttcagcaagacaccactccccaccccgacggccctcggcccccattatcaccaagcacatcccagatgtggaaagctgggctttctggaaggaggctcacaggcctgcccatcctcgtgttcacagacgggaagcaggggcctgtctgaggctacccagtcaggctccctgcctcccagcccagctctttccagtccccattcatctctggccccctcatttatctcatctctgcttttccagggcttccagggcaagttagccacctcaacgagaatggcgagaagggggacccagggtttcctgggatgccaggaaaagtcggccccaagggccccattgggcccaagggtgtccccgggcctcccggagcccgcggccccaagggtgaatcgggagactacagggccacgcagaaaattgccttttcggcctcacgcaccatcaaccaccacctgagacctggccagcccatccgcttcgaccacgtgatcaccaacgccaacgaaaactaccaggctcggagcagcaagttcacgtgcaaggtgcccgggctctacttcttcacctaccatgccagctcccgagggcagctgtgcgtggatttcatgcggggccaggcggagccccagaaagtggtcaccttctgcgactatgtccagaacaccttccaggtcaccacgggcagcatcgtgctcaagctagagaaggatgagaccgttttcctgcaggccaccgaaaagaatgccctggtgggcatcgaaggcgccaacagcatcttctctgggttcctgctcttccctgacacagaggtgtgacctgtggggccgattcaccccccgcccccaccagccaagctctctttctccccaacaccacccccatatcccggccaaagcgcagagtagggctccacgggcgttgctgaatggatgagttaataaagtttcccagcccaagggacagtggtctaattcaactctgtgtccccacaagtagtacatagtaggtgcttggaaatgttgcttgaatgctggttgaatgatggaacaataaatgacctctgaaatgactctgaacgattggataataaatggcctctgaaagcagagtgagtggtagttgctcagtcgtggccgactctttgcgacccaatggaccatacagtccacggagttctccaggccagaatactggagtgggtagcctttcccttctccaggggatcttcccaaccagggatcaaacccaggtctcccgcattgcaggcagattctttaccagctgagccacaacggaaactggagtgggtagccta

SEQ ID NO: 133 - DNA, 1855 bp, Hippotragus equinus
  source 1..1855: mol_type = genomic DNA
acgcataggtaggtacaaactactaccatttcaccttttaaattattttattaaatcttcaatgtacaatagcttctttacacatgaactaaatttttttagaagaatgatgttagatcttattacacggtgattctagctcgtagtttttccaaatgttggggaaaaacttgaaaaaggattttcacatctcacccaaaacactgaaatttaacattatcaaagagatgcttctacactcttgaagagtggccactggaaagacatttcaaaaagaaagaattgtatctcaaaagcatttttatatgattttttcctccaaagacagtaatgtttttacataattaagtccattcacaaaatggctttctgcacgtgctgtcatgccttgggccacatcaccaaatatttatgcatgactgaaatgagagtttccttgacattgttatttccatagcctgaagctgttctgttacctctaggctctcattctccctgatttattcaatcaagcccctgtcaaataacaagctcaatatcgccatctctccataacccccactatctccatggcctcctggacaatagtttcctccaccatatgatccttccatattcctaccattcagtttcccactcttcagtaactcgtactttgaaggtttctgcttataatttcccaaattattgcaattctgacgtccgtcgttccttcctctgtagttggtataaccagctctgcagcccctagcctggtggccatgtccaggtcctcctccatatccaggactaaccctcaaactaccacctcctggtcctcctccgtacccatggtcaccatccccagatttaccaccgcttccacctccatcagatcctcctttaaagtcccttccttgtccagctccaaacttcccaccaccaccatgcaagtataggaaatcaaccttacctcctccctttcctattctagaatgctggagttcctgcatttcttgtctagacaaggcctttcttacttctgcacgataaccattgatggtatggtatttctgcaatacaagcttatccacgggatcgtggtcatcaaaagtcacaaacccaaagcctcttttccttccagactccctatcactaatgatctcaatggcattgatttttccatatttcccaaagtaatctctaagatgatgcttctccgtgtcttctccaattctacaaacaaacagcttctttacagtgacaagagcccctggttttgcatagtcctctcttgggacagcacgtttgggggcgacccttttcccatcgatggaatgaggtctggccgccatggcagcatccacctcagccatggaggaaaacgtgacaaaaccaaatcttcttgatgtctggctggcaggatctcttatgaccacacagtctgtaagatatccccactgctggtagtagttccatagagtttcttctgtggtttcagagctcaagccaccaacaaagagtttgcggaattcttcattctctctcttattcctctccaacagatcagatgttgacattttcttcatcacgcacttgggcgcttgagccatttttctgaagctgaggaggatgaaggagatctcagagactaacaggaacctgaccagtcccagctcctggcttccactgctctggaaacagagcctccaggagaacctccacgtcctggcttcggggatgctattactgcctctggggcctctgccgcccttgaatcactcttgagccactttcaatttttctgcaaaacattatttaacagagtgacctttccggatgcatattactttctctatgttgatttcttcccatt

SEQ ID NO: 134 - DNA, 2104 bp, Hippotragus equinus
  source 1..2104: mol_type = genomic DNA
aaacttgagtaaaatctttaaaaagttttctcaagtcacctgaaacttgcaaatttaatgttatcaaagaaggaatgcttctacaatcttaaaaataccacaacaacaaagaaacaggaagaagctgagaaactgtctccaaggcatttttttctttgtagaaagccttctaagtttaaatataatttcattatatgatatagaattattttcttttacccctccaggaagaggacaagtaacttgtcttttactaaaagaaaaaatctatttcatcaaagttttcaaatccacttgcataaaattcacaagtgtctttttatacagccttccaatccacctctctggacctgttctgttgtcttctgccacatcactatctatttattcatgactgaaataagagtttccttaatatccttaattcaaaagcctgaaactgatctgggctctcatcctctgctattagacagtgaagcccaggacaaacaggaagaagctcaatatccacttctcccttcataacccccacgtcctccactgcctcctgggccataattttctccaccatatgggactgccttgttcctgccaatgccaaagtttccatttctcattggaccatagtcagaaggttgctggtcataatttccaaaattatcataaccacctccagagaacccaccacagttgccaaacccagagcctccaccaccatattctccacctcctcctccataacaagggtaacctccaaaattcccacctccaggtcctcctccatacccatgacagccatccctagatctggggccatctccatacccatcagcttctcttctaaatttagttcctggccctcgtccaaaatttccacccccactagaagaaacactaaaatcaaaagggtctccgtttctacttctagaaccttggacttgctgcatttcccatattgacaaagccttcccgacttctgcatgatgaccattgatggcatggcatttctgcaacactatcttatccacgggatcatagtcatcaaaagtcacaaatccaaagcctcttttcttgcctgactgcctatcagtaatgatctcaatggcatcgatttttccatatttctcaaagtattctctaagatgatgctcctcggtatcctccttaattccaccaacgaacagcttcttcagggcccagtgggcccctcgctgcccagatgcctctcttgggacagcacgtctgggttcaagcactctgccgtcaatggaatggggtctggccgccatggcagcatccacctcggtcatggatgaaaaggtgacaaaaccacatcctcttgatctttgactggcaaagtccctcaggaccacacagtctgtgagttctccccactgctggtagtacttcctcagactttcttctgtggtttgaaagctcaagccgccaatgaaaagtttacggatttgttcagcctctttcttttgccttctcatagggacagatttccaggttttctccttcacggagtcggttgcttcagcctgatttcccatagctgagggagatgagagagatctcagggatgaatgcagaccagacatgtcctggctctgtggtgagaacctctgctaccccaggaaaatgcctctaggagcacctccacggggacccagcgatgctgctatggcctctaggcacgtttctgccttcctgcaaaacaccatttccatgagtgacctttccagacccagtcatcaaattaacaatgcattttctctattagtttccaattttgaaatgcatgttttatcagctcttcattttgtgttgattttctcactaagttgggtactcaatggtttacaattagtcactgttcacttagtcactttgctcttagaaggagctcgaatatattttttttgaaagaaactattcaaactcccaaaaacactctctgaagttttctcagaaaatcaacttcagttgtacaatcaacttcaggtttacaattagtcactgttcacttagtcactttgctcttagaaggagcttgaatatattttttgaaagaaactattcaaactcccaaaaacactct

SEQ ID NO: 135 - DNA, 48660 bp, Hippotragus equinus
  source 1..48660: mol_type = genomic DNA
agcgactgaactgaaatctcagaaatggaagtcggaaaattgaaatcaagaaaaacagatttgcctaatcacagtctgaacctgtagcgtttactaatttttcccaagactctgaggcctgccgatgagggtgttctgtcggctaaccaagaaaccgccggggaacagggaaagccagctaagggacgcagctctcccccaagccgtctcccagggtaactgggagaaggcgtggcctggacatcggccccgccctcctgccttctccaactcgaataagaattggtctccaggcgcggcggggtggggtggaggcggaaccaggactccccgccccggctggggttaggccgccattttggtttgtgtggctttccgggacgttccgcgtgcctcctcgcttccgggcggttctgcacgtcagaggcccccgaggcccgcgtccgagcgtcaggttggagccgggaagcgcccctgggggtagcggcggcgggggcaggatgagcgcggaggcggcggaccgggaggcggccacctccagccggccctgcaccccgccgcagacctcctggttcgagttcctgctgcaggagtcgctgttggagaaacacctgcgcaagccctgcccgggtaagcccggcgcctgcggcccgaggactgccctcggggctcccgccgcctcgcgccttcctctgccgctaccccaccacccggggaggcgggcctcggggccgagctgtggcgccgccccgtctctgacggggcatcaaaactgcccgtgcggggcgccgctccgggaggcctaagaaaagcgggaaacagaggccctcccgcgcccgccacctttttgtgtttgccgtcttgtcgcctctgtgaccttgtgaccgtaactcgggttggggcctcagccctcccctggggctgaaccccggacagtttgggcgggggatgcggtctgcggagacatcagctgttcagaggctggtcctgacgctgaataactatcttaggtccctattttaactgttttattcctcaacgaacggattctgctgactcaattattccaaagttccgctgtaaatcaaagcgaaaacttctgaaagaaaatgctgttacagttgcaagatggttattgtataatgatgttcatgattgataccgcagttcaggagttctgtttagggagggtgggaaataacaggtatttctggaaagaggtgatggctgaaaaggtaagtaccttggatgataaattgctgataagagttcgaatccagatgtggcttgttcagtctaatccactggcctgaactggtggagactcctgtgcgagaagttggtgtacttcacgtgtgcggttttaccccactatattgtattcagttcagttcagtcgctcagtcatgtccaactctttgcgaccccatgaatcgcagcacgccaggcctctctgtccatcaccatctcccggagttcactcagacttacgtccatcgagtccgtgatgccatccagccatctcatcctgggtcgtccccttctcctcctgcccccaatccctcccagcatcagagtcttttccagtgagtcaactcttcgcatgaggtggccagagtactggagtttcagctttagcatcattccttccaaagaaatcccagggttgatctccttcagaatggactggttggatctccttgcagtccaagggaccctcaagagtcttctccaacaccacagttcaaaagcatcaattcttcggcgctcagccttcttcacagtccaactctcacatccatacatgaccactggaaaaaccatagccttgacaagacgaaccttagcaaagtaatgtccctgcttttgaatatactgtctaggttggtcataacttttcttccaaggagtaagcatcttttaatttcgtggctgcagtcaccatctgcagtgattttggagcccaaaaaaaggaagtctgacactgtttttactgtttccccatctatttcccatgaagtgatgggaccagataccatgatcttcattttctgaatgttgaggtttaagccaactttttcactctcctctttcactttcatcaagaggctttttagctcctcttcactttctgccataagggtggtgtcatctgcatatctaaggttattgatatttctcccggcaatcttgattccagcttgtgtttcttccagtccagcatttctcatgatgtactctgcatagaagttaaataaacagggtgacattatatagccttgatgtactccttttcctatttggaaaaagtctgtcattccatgtccagttctaactgttgcttcctgacctgcatacagatttctcaagaggcaggtcaggtggtctggtattcccatctctttaagaattttccacagtttcttgtgatccacacagtcaaaggctttggcatagtcaataaagcagaaatagatgtttttctggaactctcttgctttttccatgatccagcggatgttggcaatttgttctctggttcctctgccttttctaaaaccagcttgaacatcagggagttcatggttctcgtattgctgaagtctggcttggagaattttgagcattactttactggtgtgtgagatgagtgcagttgtgcggtagtttgagcattctttggcattgtctttctttggaattggaatgaaaactgaccttttccagtcctgtggccactgctgagttttccaaatttgctggcatattgagtgcagcactttcacagcatcatcttttaggatttgaaacagctcaactggaattccatcacctccactagctttgttcatagtgatgctttctaaggcccacttgacttcacattccaagatgtctggctctagattagtgatcacatcatcatgattatgtgggtcgtgaagatcttttttgtacagttcttccgtgtattcttgccacctcttcttaatatcttctgcttctgttatattgtgtttatgtgcttttaattcagtgcttttgatgaacgtctgttgagtgtttctaggtgccaggctctgtgcttcgtgcttcatagctgcattctcatttaattctgtcttcatgataatcctgtgagataggtgatcctctattttgcattgacaggaacaggtgcagagaggtaacctgatgcaagtcccactaattaagggttaaagcaataattttaaacatggtatttctttcccctaattgacagttgttgtttgctgaactgaaatctgtaaccactatgttctgtcgtctaaagtgctttcgtctgcaaaaatctgttctctttccttcttacatccttcctgatctttcgttttaatagccaggcacactgcttgtgaattataatccttagtcactgtaactacacaactgtttgggtccccttttttaccccttaactttcaaaagtgaagaatagttgatttgtaatgttttaggtgtacagtgaagtgattcagttatatgcagacacctgttccttttgagattgttttccattgtttatgtgcttatttgttcagtcatgtccgattcttgcgaccccatgaactatagcctaccaggctcctctgtccgtgggattctccaggtaagaatactggagtgggttgttacaggttcttaaaataacctattggagtatagttcaatatcgagtatagttccctgtgctatgtagttttgatatattaatattgaatatagttccctgtgctatatagtaggtccttgttgtctgccttatgtatattcgtgtgtatctattagtcccaagttcctgatttatcgctgccccccagcccctttggtaaccataaatttgttttctttctgactctatttctattttgtaagtaagttgatttgtatttttttttgattccacataaaactgttgtcatatgacatttgtgtttcactgacttactttacttagtatgatgatctctagatccatccacgttgctgcaaatggtataataatctcattcgtttttatggccaagtattatttcactgtgtatatgtactgcacattctttatccattcatctgtcagtggacattaggtttcttcagtgtattggctattgtaagtagtgctactgtgaacactggtgtgatgtattttttgaattagagttttcatcttttctggacatatgcccaggagtgagattgctggataatattaattgaagttattttctattataggttattatttccattccaataattattaaaaattttttcatatttgtagacttttagaccgtggccattctcaccattgtgagttgattgattactctgtgtagtttgatttgcatttttcaaatagtgatacagagtatcgtttcatgtgcctgttggcctatttggattccttttgtggcgagaaaccaatagggtgaatccttttgcatctttgtaattagaccttaaattcaagaattgcttccttttaaatcctagatcctgcaccagttcagcttatagtccagtttttggaacaggcttccaaaccttcagttaatgagcaaaaccaagttcaacctccacctgataacaagagaaatcgtgttttaaagctacttgctcttaaagttgctgcacatttgaaatgggacttagacatattagagaaaaggtatacaagatttaaatgaattttaaaaaaagatttaaatgaatttattttgagaactgttagatattttggtttatttcagtatgtgttcttgtaatatgggtctttaaagtgaaaactatttttctatgaattcttggtaaaatatggaagtatttttcaaaaagtataagaaaatatttgactgttgaatgaatttaaatcaccttttaaagtataaacttggtgttatcaataatgagcccatttgttattattcttatttttttgacgtgataagtagagaaaatccacgcctaaacagttttaaatcttcattttacttttacatatctgaagaaaataaaaattagtgatgaatcatatgtaatattatggtacatattatctttgttgaataattcatttaattttaccagtcataaatcagtcactgtctcttaaacttttaaactatcttattagaatcagtggttatttgtttataaataaatatttcaagtgcatcgttatataatgatttgttttcacccccttctcacaatttatagagaaataccttatagaatatttggagaaatagaaaataagaaataatagggggggggaagaagtgtttttaacatttttgtgtaatttttgttgttttcctccatatatttttaaacaaatttgtgaacataccttgtatactgttttgagttttggttatttcatatagcaggatatcatgagcatttccccagtttgttttttggagattatccattgtatagataatttattaattgttcctctattgacagttttttagtttttctctagtttttcacttttataaatcatagagctttaaaatgtctttgtccataaactttatatgaattttgagttgcgtctttagtatagattgttaaattgccaggtcaagtggtgtaaacattgttaaagctcattatgcatatactggattgatttccagagagttatattcgtttatactcacactagtagtatctgaacacttttttcaccatatattttccagcattaaatattagtattaaaaaaaaggtttgttctttaaggaggagcttatcaaggcttatcaccagatagcaatgtgtgcagaacagtatgatgtatatgatagagttggaaaattgagcacttgactggatatttaatgataaacagtaatttctttaggtgtgaaatttatactgtcattatgttaggaggtaattttttggagataggttctgaaattcttgggaagaaatgatttactattgggaatttgctttacagtaatatggaaaggagggaaatgggtgagagtagagatgaaacaagattggccatcagttgctagctgttgaagctggatgatgggcacatgggtgtgtattatattattctgtctacttttgtatatatttaaattgttttcataagaaaagcttaaaagttcttttggtaaattttcatttacgttgttgagacaggttaatagaatggccctgtggatttattactaaaacaatataattatttttagcaaagtactgaattgtgcattgtgtccttgcacaacttatgtgtcttttgattcttccttttttaagtttgtctgttccagtattgaatatgttgttgaatgaactgctgtgcatcagtaaagttcctcccgggacaaagcacatagatatggatctggccactttaccgccaaccactgccatggccatacttctctacaatagatggtaaatgtttcataaacctagaatgtgttgggcagcctttgtttaattgcattataacttcagggatgtgcttctaagtcattccagggatctctcagaggaccttgggaatagtgaatctgatggtggagaaaattatgactgcatagacgaaaagcattctgatagagaagtggatggcttacagagtttaattatatgtcagaattttggatagtttataagtcttctaggaagtactacaaaaatacttgaagtgacatttataatgtattaaattttgtttttgtcttttttttttttaaagggcaattaggacaattgttcaaagtagttttcctgttaagcaagcaaaacctggacctcctcagttaagtgtgtaagttggccaataaagacccttacttggcacttttttgtctttttttttttttgcaagtttttaagaactcttggtacagaaggaaaaaagcagaaatcagggcagaaggcctgcatgcaggtaggtttggaggggttagaagagtgagagaatcagacagggctttggataactagagtagagagctctgaaaaaggaggggagcactttgtaaactgtgcctttcatcttaatgttagctgacctgctttcaggaattaaaattgttttcatttaattaaatttacatgaaaaagatatgtttgttctgtatgtgggaaattttaatttagagtgcaaaagttaagtacaatagtttgatcaggtctggagttttaaacctagttcttagattccaagtagtagtaatttacccaaatttggagctagagtgtacatcaagtttctaacttgatgtaaataagcttttgctgccagaaagtttcatttttaaactgagggttttttttttaatacaaagtaaatgaaaaaataatggtaaataaaggagcatcatcatagttgagtttattgttgaagcatgaaaagaaatagcattaaaagcatttttatttatttaaattcagtctcactgtcaagaataatctttaagttttgaattttcagtctttcaagtaatatttggtattcttctatcatttctcttttagtatgaatcagatgcaacaggagaaagaactaacggaaaatattttgaaagtggtgagtattggtatcggttacaccgtaacctttctgggaggtattatatttagagcatgtgtatatgcttcttctaatcttatatatattaagagttggcttgctttagatgcgctaacatttagactttgttagaacataatttgataatattctaaattgacattttttaatgttgatgagagtacttggcccctagttgtcagatatttcatagtgctttagcagatgtgagaagtcactcttataggtgttttctttatattcttttatatcctctcaaaattctgtagtaaacatgtatttaaaaattaattttattttaaaaatgatttttacaaattttagtttatttttactcttgttttggccatgctgtgtggcgtttgggatctcagtttcccaatcagattgaatccaggccgctgcagtgaaagtgccaagtgctaactattggactgccagaaattccctaaaactacttttatattcagaaaaatacagttacttttaaaattgctttggtcaacataaaagtagaaaccataatttaaaaatgatctctttaattctttatttaatatacagtatatcagagataccacccaaagtgcagaggctaggaaaggagaaggaaggtaaacatctgtatctatatacaacagataatgtattttgaatgtggaagcaaaaaatgtgtcattttattattattatctaatgcctagtaaaaatgactggcacgtcaaagcatacaaaacatttcttgaatacatcaatggaacggtgcaaatcttaaacatttttcattggtaacttttatataaaagaaagatgtcaatcttttccaatttgtgttttaaatttcacaataggaaccttgtgaattttaaaatcttaagataattttcacaaatataatttcactcgtgctatgttagatgcatttttaaaatagactagtacattaagctgctaagtatcctgtaaatatgttttggttgatatagtccagtattgccatttttgtattttaaaaatttgcttattgaacttctgtagctaaaagaacaagcttctgattctatcctggtactagaggcagccctaaagttaaacaaggatctttatgtccacacgatgagaacactggacttactggccgtggagccaggcatggtaaacggagaaactgagagttccactgctggactgaaaatcaaaaccgaggagatgcagtgccaggtatttattttcagtgtttaatcattgcatggcaaatttttggaaaatcttacataaaatcatccttgtatttttaattagagcttatttctgtccttgtccctttgattttacttctgatgtttattaaaactttgcattatagttaattgtgaattttataagacctcccttgaaatttttctgaaagaaatggaaggaaaatttcacatgatcttttgtttccaatctagtttcctcgttatatttaagagactgacagtgcagggagtaataatatgaatgaactgactaacagttcattcacattataagaaatctaatcagaccaagaaaacaaaacaaaactgatattgtgctagattttgaaaaatgtaggctcctagagaaatacccagtttttcaaggatcttaaggctgcctgctctccgtaactctgtaccctagttcctttgctgctttcagttgttttttgttgttagatattttatgtgttgatagcttctttttccctgcttgattgtaaactctttgaggtctctctttttaaaaaatatatttgtattttgcatcttccatactttctagcacagaatcttgagtagaatagaaattttaaaagaattaatgattgcctgtggagggccactacaatagagcctttcatgttctatattttcttcattgtgtgaactggcataacatttttaaaagttaatctttttggctgcgctggttcattgtagctgcttgcgggccttctctagttatgccgagtggaggccactctctacttagggcggcttctcttcttgtggagcacgggcacttgggcttgagtagttgcagcttttagcctctagagctcaggctcagtagttgtggtgaatgggcttagttgccccaaggcatgtggaatcttcctgaaccagggatccgacccacatcccctgcattggcagacaggttcttaaccactgggccaccagggatgtctggcatgacttcttttatcactattgcccaatcttgaaagagcagaaatacctctgatttaagggttgagaggtaccttttcagattagctggttctggagttaaagataatcccttctcaagacttgctgagatggagtctcatcgagtaggagtcaggaggcattggcagctggtaaccacttcaagggctccccaatggctcagcagtaaagaatctgtctgccagtgcagaagacgcaggttcggtctctgggtcaggaagatctgctggagaaggaaatggcaaccccctccagtgttcttgcctggagaatcccatggacagaggagcttggtgggctgcagcccatggggttgcgaaagagttggacatgactgagcaactgtacagcaacaacaactctgtcttggcctggaaaggggaatatgtatctataatatgtgtgcatatataggtgtgcttgtgtgtatataaatctttacaatatacatacacacactttattttaaaactttagcactcctttatcctagatggaaggaagcactttagaatgaaaatctgcccaacattaagtatggactaaatagtgtaaagcagtattctagaggctgaggaagaattaatcttgatttgttgaacaggacagaatagtatctatagtccgtatcagtgaagagtagtttggtcaggagtatcagagacttacaccttaggaatttgaaagaggaatgagtatctgttggctcaggttggtttggtgcaaatggaaataaacagtgtggaatgaaatttatttctacatctgatgtgaatggagagttgagaagactggtgtgtttgaaatagagaagaatagagaggtttggagagaaggtagtccagattctgagatccttgaaaatcagcccgtggggtttgaactttctcctccttggggatataagttgaaggctttttttaaaagtcagatggagaagacagagcagtcagccttgtgaggagtaaatttgtgatagaatattaggaacctaagggtctggcttcaagtctggactctgccagtgcttggttatatgatttcaagtagaaatgtcactttctgggccttagtattcttgttcataaaatcgccaagttcaacttagtctttgaattctgcattaggtaaatctaggtatctgtttaagaatgctcctggaaaaaatgtgcagattctgttaggcaactggaaatgagctgtcattttatactcatttgttcagatttttcagtattttattctggccagttctttgatagtacacatttgctcctcctacccttttggagacatccccatggctgtcccctttttcattgttagaagaatctcctaccttctgtgacttgttgggagggagaccctgtttcctgtaataaaactgacaactccaaatattcgtgttctctagccttatcctgctggagggcaggcatgtcatatcggtgtgacagagacgtttagactgaattaagagctagctgggctcgcctggtggctcagcagtaaagactctgcctgcaaatgcagaagccacaggagatgtgaatttgatccctgggttgggaagatcccctggagaagggcatggctacccactccagtactcttgcctggagaatcccagggacagaggagcctggcaggcttcagtccatggggtcgcaaagagtcagaaactactgaagcgacttaggacacacgcaggagcttgctagtgagaaagtggtattgtggagcatccattgtgacggtgactctagcagtgaccggaaggtctagttcccgggcagccctggcggagtggagctgctgctttcagcgtctggtcctgctgcctgcagttgcccggatctgtggcgttggctgttgagatggctgcgtggtgtttcactgcatcagttgcggctcttgttctggctgcttgcctcccatctcccgtttgttttccaggcctgattctttggctttcccaataattctgtaggccacctgaggtctttccagtaagtccccttaagtcagtcagagttgatttctgttgcttgtgactaagaacattgactgttttactgctcattgaaatgtttttttttcttttttgctacatgtgtaactatgttgctgagataaaaggtgattttgttttgtcagctcttaagttcctgaaaaatcactgagcaaattggtattcattaccattttaggtgtgttatgatttgggtgcagcatacttccagcaaggctctacaaatccagctgtctatgaaaatgccagagaaaaattttttagaaccaaagaactaattgcagaggtaagtacagtcaaaacagtcacatgattttcagtcctttaaaacatctatatattttttggtatccatttttttgatgattaaaaaactgttcattgtagtaaatttgatatttaaaaaaactaatggaaatattttaaaaaatctgtaatactactctctggaaataatcccttttgccgttttagcttttttttttttttaacagtttttgttctttatgtttttatacagttaagctcatgctattttgtatcttgctaaaatgttagaatatatattttaaatatatctatcctattctgttatatatagatgtgctgtgtttttattttcctaatggttgaacatttagatagtttgctgttcttatttattataaagttacaaaatttatatctccaagcataaatttttgtttggactttagatagagttaaattcctgcaagtagaattacagtgtcagtggtcattaatttttttaaatgatgtaatatacaaattgatttctaggtacatttctgggtacaaattgatttccgaaggctctgctattagcagtgaagttttttaattgctgatttgatatttatccggaaaaccttttaaaaagttgtgtttctttaattcctagtagggcaaacattttcatgtgtttattgtttgcatctttttatgattcacacaactgaattttaaagtatataactaggtttttatatgcctggtggccagaaaaattcccacttcaatctttgctttcttcaccagaaacactgaataaatgcactagagatgtcttttattgggaattctccttttaatttgcctcgggaagtcatcagatttctaattttatggcatctgggatatagtaatttaaaactttaattttttaaaaaagcatgtcttaaaaaattttttttcttttttggtggaagcatttctattttttctggttgagtgaagattgagttttctttgttgtccccctttaaatctctgccaagtatatgtatcaatattttaaagtattttcatcttttttttttttaacagttttcattctttgttagtatcttaattgttgttatacctacagagagtgataataatgtctaccttcttatgttggcctgaaaactctaaaccagaagtcaccaaagtttttttgtaaagggctaaataataaatactttagactttgtgggccatgtacagtttctgtggcattgtctaatttgttggggttttattttccctccctttacaacactaaggattattcttaggtcatggaatctgtaaaaacaggacatgggctggttttgacctgtgagcaatagtttgctacccctgctctaaacctttaactttttcattttttatgattcctgttttccattggcgttttcttatactgttaaaatgcaataaatgggtgctagactattgtttctgttacactgatggataatgatatatacctcttactttacagataggttcattatctcttcattgtaccatagatgagaagcggttagctggctattgtcaagcatgtgatgtcctcgtgccgtcctctgatagtacatctcagcaattgactccatatagtcaggtccatatttgtttgagatctggcagctatcaggtaagatgtgtgatggggatacagtagtgtcattggaaagccctgtaagccagacagcagagttcaaatcatgacatcaccatttacagttgtgccatttggggcacgtcaaacagattggcctataaaatagttgtaataattaagctttttatgagaatcaaatgaaaagttatagtttataaactcttaaggcagagcactggatagatgttgactcatattactgataattatcctgtcttgaaggtataaaatttgcccattttaagtacattctgtaagaaactctgtaggcagaacttttaacttttaaaattacaggtagagaacttttggttttatggaggctaaagatctgaaagtacggtcttccaccctgaccttattagccactgcgaacagtgagactgaaggagagggtgagcagagcagttttggtcagcttggatagtctgttacatagcccacttttccagggaggctggtcgtcatctcacttttactcatgaaaagagcttaaattagtctgttgagatttttttgttgccccctctgagtatatatctgcagctttgtaatgaaaatcactgggagttagaatttgtacttttaaaaaaagccttaattctagaaagtgaacagtgccttcatcttattaaattcaaaacaaattatgaaatgacaatgctatcacatacctttagttttgtgtctccacaatggacttttagcctaggtttttagttcacttttctcaacttttggggttttattttttcttcagagaaaatagaagagaggggacagtgctccttcccctgccctctggccccttttttgccaattctgatttgccctagggaagaaaagtaaactttcttgaaggtggatttcagatacagatgaagttatcaaacacaagggatctttcagttacctgtccctaatacaggcttatggggagtggtaatcagttaggataagatgtagaatctttaagacagtccctggcatagtaagacccttgcagtcaagaatggcagtcacagatcggcacatgttaccacgtgtgacatgctcagtcgctcagttgtgtctgactctctgcgaccccatggactggagcccgccaggctcttctgtccatggggattctccaggcaaggatactggagtagtttgccatgcccttatccaggggatcttcccaacccagggattgaacccaggtctcctgcattgcaggtggattctttaccagctgagccatcagggaagcccgcatgttaccatagatgtaataaaggggtcagtgctcttgctgtagagctgatttagctgtttccagaaatccccacactgtcacccctactttcttccattgcttgataaagagctgataaacaactgagaaaaaagactattaaaaatactatgataatataatttattagaatgataaattttgtacagttcactaatatattttaaaccatttaacctgattagactagtttcttagcacactttttttagctgaaatatttctctgttttagcgttttaaaaagtttgttgtatgaaatcatgtttaaagtgaaggagaggaattttaaaagtctctaataacatagctgaattactacttaatgattcttttctcacctctcacttttggctcatgatctccaattttaaacaagggtagtggggtgcttttgccatttcatactgttcatgcggttctcaaggcaaaaatactaaagtggtttgccattcccttccccagtggaccatgttttgtcacaactctccaccgtgacccgtctgtcttggatggccctacacggcatggtccatagttttattgagttagacaaggctgtggtccatgtgatcagtttggttagttttctgtgattgtggttttcattctgtctgccctttgatgaataaggataagaggcttatggaagcttcctgatgggagagactgactaggcggggaaactgggtcttgttctgatgggcggggtcatgctcagtaaatctttaatacaattttctgttgatgggtggggctgtgttccctccctcttgtttggcctgaggccagactgttgacccatgcctccaccagagactcctggacactcacaggcaagtctagctcagtctcctgtggggacaccgctcctcacttagtcatgtatgcatgtgagagttggaccataaagaaagctgagtgccaaagaattgatgcttttgaactatggtgttggagaagattcttgagagtcccttggactgcaaggagattaaacctgtcaatcctaaaggaaatcaacccttaatattccttggaaggactgatactgaagctgaaactccaatcctttgcccacctgatgcgaagaactgactcattggactgttaaaagacctcatgctgggaaagattgagggcgggaggagaaagggtcaacagattggttggatggtcaacacaggttggatggcatcaccgattcaatggacatgaatttgagcaagctctgggagttggtgatggacagggaggcctggcatgctgcagtccatggggtcgcaaagagtagggcatgacttgagctattgaattgaactgaggggggtgctatttttacccttaatgtaattttaaaattttaggaagagattttcctaacaagatattttaatgattttcttcactgtgtaatttctatttcagaaagacttaaaattttatttaaaaaaaattttttttaagagactttcaagatttttgaaatagttgcaattttttgtctgtgttccaggaggtaataaagatctttgttgaagacaacttaagcttcagtttacctatccagttccggcagtcggtcctaagggaactctttcagaaagctcaacaggggtaagtaagtgaattactttttgatttttatgtaatagtaagtgtgcatttccgatttatcaataatgttcctccagattacctgtatgtctgccacagtgctttcactttatttttactgtatggagagttaacatggttagaggagccgctttaattttcatctaattctttttttaaaagtgcttgggtaaaaaaatttacacagcagagtttgattctgttagtttgattcagattaatctgtatacctaaatatacacttttattctcttccaaaacttcagtcacttgctcacttggtaaatttaaaactttcctgtttatttttttcccccattgacttaggtaattactaatgtgcctgaatattgtaaaaatcttacctctcaagaataaatggcccattcttgtgattttagttttataattatacctttgtattaaaaaataaatgagtgtatctacttttgtatttgacagaaatgaagccctggatgaaatctgttttaaagtctgtgcctgtaacacagtccgtgatgtattagaaggtagaacaattagtgttcaatttaaccagctatttcttagacctaataaagagaaaatagactttctgcttgaggtgagacgtttttccccctttggtttataattttgctttgagttttccagtggcctcctagctgccgcacctggaaccctcttcactgtcctcgtccgagggtctcgcctctccggctcaggcggcgcggccgacagtgcgcttgcccaccgtgtctgctgctggagctcgcttctgcttctccgccatcactgggttttccttagtcctccattgacttctcctttgatctccctttaatgttttcctttactgaagttttgtccttggctcactcagcttgttttactcttcaccacttattttcttccaaaacttcagtcacttgctcactaaaaacgctcagatcatacctcttgcctctcatgtgagctccataatttgtgtttctaccagacctctctctctctctaatagtcttaatgtagcagaccttgagagaagtgcatcaaatacagataataccattttgttccaaaaatacgatactgccagtgctctcgaagtccttaatgtgtcttcccacatcctctctgctcctccttgaggaagctactaccctgcttttttgtgatagttatttcctcatttctcattacagttgtatcccctttgtatgtacccttaaagaatattcttaaatttgcctgttttgacctccacataaatgaaatcatatttgtcttttttaagttgtctttcagggaacatatttgtgagatgtttttcaagttgtatgcagatatagttttttttttcctcattgctgtaagatgttacaacattatgtaaccatgccacaatttatttattcttatgattatggacatttgtgttatttacaggttggggttattctgctgcttgaacattcttgtgcttacatcctggtgcacccacataccatttatctgttacattcctggagaaagtatatctgcaattttaccgtaaagtttcaaagcgtttctgccactgcatgtatgagagtttttgttgatcaggatctcactgtcagatttcctgtctgggtcattgtataatggtatctcgttgaggtgattttacttacttatttgttggctgcatcagatctttgttgctgagtgggctttctctgcttgcggcccgtggggtctactcttgattgtagtgtgttcattgcagttcaactgcagtgcagttctagccctgcattgcagggcttctcacagtggcttctctctttgaggagtgcaggctctaggtgcacaggctcagtagttgtggggcggagacttagttgctctgcagcatgtggaatcttcctgaaccagggattgaactccagccccctgcattggcaggcaggttcttaaccactggatcactggatcaccaggaaagcccccattgaggttttaatgtccttttcctttccctttattttttgtttctttattttccttccttttcctttattactggtgaatttaacagcttttcatttattttttttcatatacagatttcattttttgaggtgcttgttcaagtggtatggctcagttttctgttgaattgtcttttttattttttggcaggagtttttaatatattctgtcctttactagttttaagtattgcaagtatgttttctgaggttcacttttaacttttattattttaaaagttcttaattttaatataataaaatttatcagtctttctcataaaggaagagattaatgaatttctgtgtcttgcttaaagcttttcatatcctgtagttgtgaaaattatcctgtattttattttctaaaagctctagaacttggccttcttttcacatttaggtctttaatccacctgtgattgaatcttgtgtatcatggaaagatttgggtctttaatccacctgtgattgaattttgtatatcatggggagatttgggtctttaatccacctgtgattgaattttgtgtatcatggggagatttgggtctttaatccacctgtgattgaatcttgtgttcatggggagatttgggtctttaatccacctgtgattgaatcttgtgttcatggaagtagggaatccggtgtcattttttcctcacgtgtttcagagccagttgctgaaagtgtcctcttttttctgccggtgtctagcgctgcctccattggattccaagtgtcagacatgcacacctgtgtgggcctgtctctaggctactctgtgactgcttttctgtttgtttacccatccatcatacccgtacccaggcttggtatcatctaaagcacaaaccttgttttccaaagttgtattggttttgcttatctttttacattttcttgtagacagtagactcagatggtgaagtttcagaagtaagcctgttggatttttgtttgaaattacattacacttaaaagccaacttgtgaaaaattagtagcattaccatattgagtatcctaatccaggagctggtatggctcttgatttattttggtgccctttaatgtcctttaaagctttataatttttccagagaagttttttttttttcatgaactataattgaatttgtataattgactttgtttccagctagtaatatacaattcactcattcaaagcgtacagttcagtgatttttagtatgttcgtagagttgtgcagccatcacctcagccagtttgccaacatttcattcctctctgcccctgtaagaaaactcttaaccattagcaatcatttctcattttcctctcaatccctgcaaccctaggcaactattgatctattttttgtctctgtagatttgcctattctggacatgtcatataagtgaagtcataaaacatacggtcttttgtaactcacttctttcacttggtattgaagacatttcatccatgttggaatgtccctcagtacttcattcctttttataggtgaatagtgtcctactgaatggatacacttacttactcttcagtgtctgttttgagtgtccattcatcacttgatggacgttagtgttgtttctattttttggctcttgttaatagtactgctgtacatgttatataatttagcttttgtgtcagcatattagagagcattgacaatttgttgaggttaggatcttttatactaataactttttgacttcttgtaaataatatgtgggaagtctaacctaataaattcacaatgatatttaaataatattatttttagatgactaatattttcatagctaagttgctctttgttttcattgtttattttttaaaccttggttacctccctaaccattggtcctgtgttctttagctattgtggatcatccttctcagctgtccaagatgggtcttttctcacttttctgaggggaactcctgattcttacagtttatcactccatttaatttggggccatactttgtaaatttccatgggacttgttcatatgctaaatagattattctttactgcataatccgtgagattatcctttacctacagttcttgaaatggtcacattccacgccctctgcccataatgcattcttattctttggtctcctttcttaaatttcttaaccaaatctgtgactgatccatgtctgaaaggacaatttgattgtttttaaatctaaacttgcaaactgtagtataattattttgaagtacccacattcaaataaaaattacccaaattcctaggtttgttcaagatcaataaatttagaaaaagcttcggatactttgaaaggaaacatggctgcttttttgaagtaagtgcctttctttttcttcttttttttaattttgagcttaggtctgtgagaaaaatatcttttattccttatcattttacatttaccttgcctgtcttcatatatccaggtagtaattggtagttgagaacacttacaatttaaatttgtgtagccgcataaaacttaggattcttgctgttactctctttaatactgtagcagtgaaatcataactttagataaggaccaaagagaaattttaaaaactgttcaaattattgttgtgcagttactgaatggtggcttttaaatagtttattaataaaaattggttatatgattttttttccccaaactaaaattatattcttctttgttttataacatttcttactgatctaggaatgtgtgtctggggttggaagacctgcagtatgttttcatgatttcttcacacgagcttttcatcacattactgaaagatgaagaacgaaagttacttgttgatcagatgaggaagaggtcccctagagtcaatctgtgcattaaacccgtaacttcattttatgatatcccaggttagatttcctagctcgaattttggcatattttgctcctcaggatatttgaggctatcttcttaattttttttctatttacactaatgctggtaactaatagaaaacctgtcttttgaggtcatattctgtctaagcagttaagttttgggagtctgctgagtatggttaatggagatgtaggtctggatacgtaaaagattttagctggggaaatagatctgctgctctgttcttgaaagtataaaccaagacggaagaggagtggttagaagcaaaaaatggtgcaggtttgcatgcattacagtctttatatcactgtctgctggctaaacattcagctttgacaacatgccattttagccttatttgatgattttcttccattgttttctcttattttataaatgtaataagaaaatatagtgctgcttgttaataagaaatacaagcttcaacacttcaatatgcaggggagacagaattcagttgactgaacttgttgctactttggacctcactagatttaagctgctttgactcggtcataaaggaaaagagtgatattatcacagataaaatgctggcaatgcattattgaagactgtatctgaaagttgagttgtaattaggaattttaatgatctattcttggttctctgggaaggcagtgcctctaccttctcattctctcccttcgaaaaacattcttaaagtttactactcagaacattttagaagtgcttttaacacaggatgttcaaaaataaatcaaatttttccatatatcccacataattctttccatgtaaagttactgatttttattggtttatattttcattacctttatttgataaatgaagacataatccaagttgtgttaggctttttatatgagagtgaagttaaaacatagtttgcattaagttggataaatcagttttcaagatgaaagtttataaacttctaatgtttataaacatgcacaatttctgtcagtaaattaccattctcatgttttcacgattatgagtaacgaatgaataatgtatcaaataattatttaaatgaaaatctcttcttcctttcttagcctcagcaagtgtcaccattggccagttggaacatcaactgatactgtcagtggatccatggagaattcgacagattttaattgaattacatggtatgacttcagagcgtgaattctggacagtgtctaataaggtaagaaacctctgttgagaacagataaaaaaatgacccttgttttctgatgtaatctaatagaagagctagctgttccttgaactttttgagaataagaagcccttttgtttgttaataattcatcagtaatgtgaaagaccttcacacgacattgtattttgaacatctactgatagagaaaatatgaaataggtaaaaaagatattaaatcagtaacaacaaaaaatgagtttctgtttcatttgttgttacagcatctacatgcattttcagtatagctgtaaatatgtgtatatttgtgcagtctgcagctaatacttgccatacagagtagttttggtttagttttttcatgtcctaagtctgaaggctgcaggttagaatcacctcattaaaacttgtttatagaacatttttagctttagatatgtttttaaaaatgcccccctcactccccaaaaaatgccaagataatgtttctgaagttgtctaagttctgctgcatggaaagtgcaaatgaaatagctttttaaacattcagtggagtatagctagagattattatactttaccttcacctgcatctgtgagctaagggaactagctcacagatgcaggtgaaggtaaagtgtaatgatatggggagtttgcctttagcgtgagcatcttattcgttaggtgtagtcctagtgtgtccatgctgttgtgtcccagctctttgcagccccatggactgcagcccaccaggctcctctgtccatgggatttccccgggcaagaatactagagtgggttgccatttccttctccaggggatcttcctgacccagggattgaacccattgcaggaggattctttacttgctgagccactagggaagcccctataataatatgaatgtgtttctaatatagctagctgcgtactccctctctgctgaatgtgataaaaagcagctagaaattgatgtgtattctgtgggatttgaatgtacaagtgaagtgaaatgaaaaattgatctcagtcttagttgggcttccatagcattgaaatcattatttgtgttcatttatatggatgaggaagtgtacagcataagagttatgagccaaagttctggtactaagtacctgagtgtgaatcccagtgctctacttaattagctgtatagtcttcagcaagttatttaacttctgtgtacctccgttttctgatctgtgaaatggagatatagtacctatttagtaataacttgtgaggatcatatggattaacacatactaaactcctagatttcgtctttatctctataggctatccttcagaaagttccaatccatttaattatttattactaggttattatagtgaatatgttcatcttaattagcggttcgttgcagctatcattttcttttctctttaaaaaatgacgtttgaatgattttattaaatggagttgactgttactgaagaattgttatctagatttggctttgtgtgtgtgtgtttatgtatttttatttcttctagtgggagttacctcttgtctatagtagtgtcatcctgggaattaaagacaatttaacaagagatttggtttacattctaatggccaaaggtctacactgcagtactgttaaggtgagtaaaattatacactgacctctggttaagaatatgctttattagtttagggtaaaaccaggaatcaggatcagttttgtgtttctggtcttaaaatcatcattgtaggtctgaaaggatatctgaaaaggcattttggtttattcttttccctttgtcctcataactatacaaaaatggtcttggacatatagctttgtctctatttcttttaaaaaattagacaacatgaatagttcttatttgtatttagtattgtgttagtaaaagattgtatttcaagctaaaaacaaaacaaagatccttaaaatcacttgggaagtagtctgggctggaaatacagatttgggactcatcatagatcaccctaggaggatatactagggtgtctagcattgcatccaagaaacagtgtcatggaagagtctgctatgagaaccagacttgtggagtcatgatagctaaggggatagaagatgtcaggtagagggaatggacagtactggactgtagccccaaagtccagttaagtaactggaagatactcagtagaatgtgccattcagttcagttcagtcgctcagtcgtgtccaactctttgcgaccccatgaattgcagcacgccaggcctccctgtccatcaccaactcccagagttcactcagactcaggtccatcgagtcagtgatgccatccagccatctcatcctctgtcgtccccttctcctcctgcccccaatccctcccagcatcagggtcttttccaatgagtcaactcttcgcatgaggtgaccaaagtactggagtttgagctttagcatcattccttccaaagaaaacccagggctgatctccttcagaatggagtggttggatctccttgcagtccaagggactctcaagagtcttctccaacaccacagttcaaacgcatcaattctttggtgctcagccttcttcacagtccaactctcacatccatacatgaccacaggaaaaaccatagccttgacgagacagaccttagtcagcaaagtaatgtctctgctttagaatatgctatctaggttggtcataacttttcttccaaggagtaagcgtcttttaatttcatggctgcagtcaccatctgcagtgattttggagccccccgaaataaagtctgacactgtttccactgtttctccatctatttcccatgaagtgatgggaccagataccatgatcttcgttttctgaatgttgagctttaagccacctttttcactctcctctttcgctttcatcaagaggctttttagttcctcttcactttctgccataagggtggtgtcatctgcatatctgaggttattgatatttctcccggcaatcttgattccagcttgtgtttcttccagtccagcgtttctcatgatgtactctgcatagaagttaaataagcagggtgacaatatacagccttgacgtactccttttcctatttggaaccagtctgttgttccatgtccagttctaactgttgcttcctgacctgcatacagatgtctcaagaggcaggtcaggtggtctggtattcccatctctctcagaattttccacagtttattgtgatccacacagtcaaaggctttggcatagtcaataaagcagaaatagatgtttttctggaacactcttgctttttcagtgatccagcggatgctggcaatttgatctctggttcctctgcctttcctaaaaccagcttgaacatcaggaatttcatagttcacatattgttgaagcctggcttggagaattttgagcattactttactagccgtgtgagatgagtgcaattgtgtggtagtttgagcattctttggcattgcctttctttgggattggaatgaaaactgaccttttccagtcctgtggccactgctgagttttccaaacttgctggcatattgagtgcagcactttgacagcatcatctttcaggatttgaaatagctccactggaattcaagttctttatttagtaagagccatttcttcttcatgacatgaggaatagaagccagattataaaagcatgtggagagagagagaatgagcgaaggctgtgttttggaaaaattagaagatgatgtataggaaagggcttagatcatagcttatttgttttatttattagtcagttatataggctaatagggttgtgtgcagaattttagaatgtggaacattgtggaagggggtaacgtctaattctgactgtcttaggtggagaagggtgtttaatcatggaattttatacctgtataacatatgtatattgtatttaacatttatataaaccttttttgttttgttacagtttatgtaaaacttctttagtaatacagcatgcatattatactgattttttattgaatgttttaaaaaattacagggaattccctggaggtctagtggtttggagttatgcttctattgcaggaggcatgcatttgatgcctggtcaggaagatccccctggagaaggaagtggcaacccactccagaattcttgcctggcaaatcccatggacagaggagcctggtgggctacagtccatagggtcgcaagagttggatatgacttagcaactaaaccaccatatatatctgcaccaccaccacagagaactaagatcctgcatgccacgtggtgaagccaaaaaatatatatatgtaaaagcattaaatatttattggaataagtcggtaatgcagagatgataagtaaaaaggtgataatctagcctcactcctcgagataaccagtgttcaccatttaaattaattcttttctttgttctgtacttataaagacatttttctcacttcagaggaaaggtgattcagaccattctgctattctttttataggactttgcccatgctaaacagctatttgctgcttgtttggagttggtgacagaattctcaccaaaacttcgtcaggtcatgctgaatgagatgcttcttctggatatttatacacatgaagctggaacagggcagtcaggagagagacctccttctgatcttattagtagggtgcgaggatatctggaaatgaggcttcctggtaagacactttcacaaagccagatttcaggactttagtactcaagtaactgtggggaagattctaaaagaatatttacaggactttttaaccatcaatgaaaaacttttcttttaaaacaattcagatgtggagttcactcgagaacattgggggtagtgtcgaaaactgttctaggactgccatatattagtaccaaaaatatgtttgtttacggttccggcgatgagatgtctgaaatcagggggtctgcagggccgtgcttcctttgaaggctgttgctcctctgttgtctctagtggctcccagcggcctttggcattcctgggcttgcagctgcatcacttgtccttgtctctttcatgtggccttctcgtgtgtgtgtgtgtgtgtgagtgtgtgtgtttgtgtgtgtcattttgtctctttcatgtggccttctcgtgtgtgtgtgtgtgtgtgtgtgtgtgtttgtgtgtgtcattttgtctctttcatgtggccttgtgtgtgtgtatgtgtatgtgtggcattttgtctctcacatggcctcgtgtgtgtgtgtgtgtgtgtagtgttttgttgctttcacgtggccttctgtgtgtgtgtgtggtgttttgtctctttcatgtggccttctcgtgtgtgtgtgtgtgtgtgtgtggcattttgtctctttcacgtggccttctgtgtgtgtgtgtgtgtgtgtgtgtgtgtgtgtgtggtggtttgtagctttcacgtggccttctgtgtgtgtgtgtggtgttttgtctctttcatgtggccttctcgtgtgtgtgtgtgtgtgtgtgtgtgtgtgtgtggtgttttgtctctttcatgtggccttctcgtgtgtgtgtgtggcattttgtcgctttcacatggccttctcgtgtgtgcgtgtctgtccgtccgtgtcctcatccctgtccccatctgtcctctcgtaatggcaccagtcactggatttagggtctgccccaatacaacgtgacttcattttaattaacacatcttcaaagacccactttctgagtacgatcaccttccgaggtttcaggtggacataaattctgaggggacacctctcagcacactgtagaaattatattgcagttttaagatattctgttagaagaatcaaaatgtccttgaagctgcatgttgaaggtttatttcctcattgctgccatagacagccctcaaaatgtttgccagcgggtcagaaactcacttgtgctcactttaggaacaggtttggccggtctgaaaatgtcttatgaaaaggggcttaaataagaattatcacctctgttacatataatcttgcttaattaaagaagtttcttaattttacatattttaatatttagagcagttcaatcgtactgtacacatttaatactataaacagtaaaatttatgttgtagaaatatcaaggaaggtgctaataaggtgtgcaaacaaatggctgctggttttctgggatctgttgaattaattgttaataacattgtgttttcttaaagacattacaactttttagcactctagagatagaattcctttgagttttaatgtcagtgcccttcagtcttaataagaatgatttaattaatatatgctgtcaacagagtgttttctttttaaaggttgaagattggttttttcatatgtgatttctctgaaatgaaaagcaaaaagaattttagaaatcctaacatctattgagtggtgctaactctatgtctgacattgttctaagaacttaatacataactgatttagtcctcacggcatctctatgaagtagctgcctctttaattatccctgttttgtaaatcaagaaacgaaggttaaagaatttggccatgaagtaggagacaaaactgtgttttgaactcatcagtccagcttaaccctatgcctttactctttgaaacgattggaaacgcctttgtataattacagtctctttgtgctaccttttgtcatttgaatagtttggggttcacatacttttcctttccttcatccttccttccttccctcccttggcttactgaatgttcatctgtttttcccatagtttgtgttgtgaacagtgttggaaatgagaagggaaaggatgtactgttaggaagaatgagaaaatgattgatccccactccagatgctaattcttctctaagaacagttggggactctctaatgagaagtgcccagtgaaaaaggaagccttagagccagatgctgtctggctttcctttggcaaagtatatagtgagcagtgcacagtgaaacgttgtgcactgggatattaaatttacttctgtcttcattccttctttaagaagataatgcagagtgtattcttattaatttttctgtgttcctatgtctcttttttgttgtttccaattgctttttggaataaagtgagttattaaacaaatagccccaggtacagacttttagaaagactcaaaaatctagctgtccccattttaagtgtcagcgttgttatttagtattcaatgggtttattttcctctttcttgaaatacattaaaacctgactattatatactttgagctataaaaattcaagtgtatttaatattatatttatttcaaaggaaataattgtcaaacagttctgagtgacttttttcctcatatctttatttgaaattgttgctggtgtaatgttttttgaagagtaaatgatttgtgtcatgcctatttatcatgctttactcagaataactattaaaaatgatgagtattaggcatcttagggtgttagtagtagagaattttgttgattagtagtggaaactgtggcagtccattattggaaaatattggactttctagaagaaaagtataaaatgttagagtttttctattttttttatctgtaactattttcatttactcaactggaatctgagcaactatttgctttgttcttttaatattatggtagtaattctaactacttttttctttgctttttagatattccttttcgtcaagttatttctgaggagtgtgtggcttttatgttaaactggagggaaaatgaataccttactctgcaagttcctgcatttctactccagagtaatccgtttgtgaaggtaattcatgtttaaataaaagaattattagggtgggattattggaccagtttctttagatctgtactccttagagaacttgtccagtttctaagattgaatataagtgtggacaaatacctattgggttgcaggtaagagtatagtttttgataattaaggcacttgagtttgccctctcttaatattttttttctagtaccatatagttatgaaaatttaagcaaaaattatttagttaacagacaacattttggtataatcctaaactagtgagaagttagttagtttttcttgctttgattgatgtagccagaccctgactttagctctggagtacccggggtagaactgagggagccgccagggatgaactgcagccgtttccatgtgagcaccttcagttcagttcagccactcagtcgtgtccactctttgcaaccccatgaatctcagcacgccaggcctccctgtccatcaccaactcccggagttcacccaaactcatgtccatcgagtcggtgatgccatccagccatctcatcctcggtcgtccccttttcctccagcccccaatccctcccagcatcagagtcttttccaatgagtctgctcttcgcatgaggtggccagagtattggagtttcagctttagcatcattccttccaatgaacactcaggactgatctcctttagaatggactggttggatctccttgcagtccaagggactctcgagtcttctccaacaccacagttcaaaagcatcaattcttcggtgctcagctttcttcatagtccagctctcacatccatacatgaccactggaaaaaccatagccttgactagatggacctttgttggcaaagtagtgtctgcttttgaatatgctgtctaggttggtcataactttccttccaaggagtaagtgtcttttaatttcatggctgcaatcaccatctgcagtgattttggagcccaaaaaataaagtctgacactgtttccactgtttcccaatctatttcccatgaagtgatgggaccagatgccatgatcttcattttctgaatgttgagaaacatttcactttcatcaagaggctttttagttcctcttcactttctgccataagggtggtgtcatctgcatatctgaggttattgatatttttcctggcaatcttgattccagcttgtgcttcttccagcccaacgtttctcatgatgtactctgcatagaagttaaataagcaggttgacaatatacagccttgacgtactccttacccttcctcaaagcctgttaaactctcttaagttgatgcctgattcttattagtatgcttgtgaagttgctttagttgtgtctgactctttgtgaccctatggactgtagcccgccaggctcctctgtccatggggattctccagggaagaatgctggagtgggttgccttgccctcctccaggggatcttcccaacccagggatcgaacccgagtctcttatgtctcctgcattggcaggtggattctttaccactggaagccccttattagtgcgcatgtttgttattagtaattatttccacgtgaaagaattcattcagtgaattgatggtatgttgtttattttactttcttaattgtctctctcctgtaccactgaaagtacttctctgtgcagagaacttgaaaaatatggatgtgttttccctaagaaaatgaatctttcatttgttaattctgtgtttgccctgaagaagcagtgagcttttctccctttctggtcttacagtttaaaaaaaagaagtttcatgatttaagacttttaatgtatgcatctcatcccaagtttctttgttcttttgtaaaaatgcttatttatttatctttgttgctgcccttgggatttctctggctatgacgactgggggcttctcatcgtggcggcttctcttgctgcagagcacaggttctagggcgcacggcttccgtagttgcagcttgtgggcttaggtgccctgcggcacgtgggatcttccctgaccagggatcatacctgtatcccctgcattgcaaggcagattcttagcttctggaccaccagggacacccttattcttttcttaatgcttgtattaccttttgtggttcttatctgccctcatctcatctttagtacatagtcccttaaattgatgatggtatctgggaaccttgcaagattgtactagttttttacatttgtcttcagttatttgtttcttctttcttatttcatgtatgtcctttgaaaaactgagctcattttatttcagccttttggagacttactgattttttggttttccctccttttttgttttcttcctgattgttcataaaaatatattgttgtccctgaattatccttgtctttgtatttcacactttggattatatctgtgtttttagtcaacttcatgagatgggaggtcctcatatttagggagtttttctgattatgcccagcagtcccttaggctttagtaagccctcagatgagagaactgttttgtctcaagatggtcatgtccactgagaatggtggcttggtattaaggtggtgctgtagcttctctctttgttcatcttagcagtgagttcggtggagccatgcaccagagaggtttgtttgcgtgtttgagggcctgcagtgcagaaggctgtgctgtcggttacctcaccctgggcctggttagcccctgcttcctgcacttccccctctgtctacagagggggaagggtaaggggtgaccttgctgcagggccactcaggggactcattgtctcatctgggttagggttttgtgtgcctccttccttagctggcctcttgttcccttgttagcatagaggagaaagtagagaaagaagtctagagtgtgggatgtgtattaaaaattatacagagtagagcacctttcagactttgaatttcatgtggaatattaatacacatgcatagggaagagtctggaagggtattaatagtcattatccctgggtagtgaaacagtaaatgatttaaatcgattttattttccattctgttacatattttatttctttaagtatccgcttatcacaaaaaggaaagaagctcttaggcatgtgactaaagacctttcgagatagtaaaaactgtccagcctctcttgcggatcagggtgggggtagtgtagtctaggaaaatgtatagtgttgacgggcacttggattataggaggctggctggtgggaggaggaggagaggttagtgctcacttaggtcgcagtggtgtaggaaaaggcctggcttggaccgagcctgccagcctcttacggaacgagagcctctccttcctggcctgccctccagcctgtccgcagtgccagcgcgctcccagccccgtcctcacggtgcttcctcatgctcctgcatttctgccggggttcattctggatcctgcgccaccttaggtcctgaaggctgcctttgttcagatcagtcccttttagtaatctgtgcttccttaattctgcctcctcacatcaacagtagttacgtccccagtcgctaccatttccttagagaaaagttgctctaactcttgttcttctgttctgccaacttcagtgtccatattttttcctcatttttttcattaaaaaaaataatatgtgggtgtgagtgaaatttaatatgtgggtgtgagtgaaattttaatctatctctgggcttttacaggtaacactatcctgtatatattccattacaggctttttttttccaagtgggatcatagtaagtgtatttagcaacttttttcccccacttaatagcacgtctcttgccttgtttcacttttatcctcattagactatgctgtttttgttctccttagactggttgtttagaaacaaggtttgtaatgtggtggaaccagagggtcctcttcccagatctaattcagatctgtcagtggacagtgagctccgaattccccagtggtcggatagaggccagcatcaaacaaccgcgcttcgtatgtgcgggcagtttcgatctttcttcaaatgttcctgagtaatagaaacagcatgtatgacattacagattgtcttctgtgtgttttctgtttttcctgttatagcttggacagcttttagcagctacatgcaaagaacttccaggccctaaggaaagtagacggactgcgaaagacctttgggaagttgtggttcagatctgtagtgtgtccagtcaacacaaacgaggaaatgatggcagagttagcttaataaagcagagggagtctacattaggtataatgtatcggtacgtttctatccgtttattttttaagttatttatactattttgtactattttaagaacgtctgtcattatccttgtgtatcataaaaatggacaatgtaagaattctttgctgctgatctcggatggacttgtctaatagcaccaacttaggaaatacctgtgtattccctgtcaacagtgtctggttggatagtactgaagatgtcacatgtaattaaaacaggaaagacattttattaggttagtataacaatagaatactatactcttctatacatgcagaactgaaaagttaggactagaacttcacctagaatttactttcttgtttttattttgaatttctggtattaaatgtatatacaaaaatttgtgtctttgtaggagtgaactgctttctttcctcaaaagattaagggtaagttttgtaaaagtgggtctaactactattgctgattctgaggatatgataaaaaaaattattgagtgttaaaatgctgattaagtaatctgttaatgtgctttttatctttggtgatcatttcttttgaggatgggatagtctgaatagagaagtttgttttgcatttaccttactctgttttagtgagtagagtaggtatttttaagttgtaaagaagtcttcgtaatagggctagatgtctgaatcctaagtttttgataggattaatatcatatttgtttattagacatagattccactctttaaattccattctataaacagctgtgccacacagcttgtgggatcttcattctcccaccagggatcaaacctgcgccccctgcggtggaagcatggagtcttaaacactggaccaccaggaaagtccctgaatattagtttgaggaataaaaaggcaattttttttagaggtagctggaagtactagtgggaaggagttcttttaattcaatttcaaaagacgtgggaggacagacacctaaatttggtcatttttttgttaattgtgtgttgtgatttctttcatgagattaagaataatgttaatctctagtgtactcctaactaaagcgggtgataactttcaaaagggtaagaatcttttgacggaaagtacttggtatccttgaggctgatagagaaatattaagatgtatataatatttaaggattctttattttctttctcgtaggaaccattggttttgactattattttgtcactctttgtgaaacttcacaacgttcgggtcagtatttcataatttcatctaaaaatttttttgaaagttctttataagtcacactctttttttttttccttttttttttttaaataaggaggacattgtgaatgatattacagctgaacatatttctatctggccatcctccatccccaagtaagaagtattatagcttacattttattaaattgtttaatatatatatgtgtgtgtgtgtgtgtatatatatatatatatatgtaaactatcctgactgatatagataaccttgaataacttgattaaaagactgcagttcgttgcgactgtatagcaacttcatatttctctattacagtaatgatcttcctaaaaattaagcatcaggcataactaagtaagagctgaagtgcactagccttaggttgaagctagacagtctctcagtagtcccgatttcttgtcagtggtggaattagaaaatggaggctaataaaaggatgacattctacctggttttcctaatactgattgtcagaggtccccacctctttttcgttaccttaagaaattctttagttactttaagaactcttctcttttccttttaccacctgagaaccacagtaagagaaggacaacaaaggggagaagacagtgttcttccttttgtggaagaagaaactgttcacatttttctcttcccacagacgccagcttcttactcaggagagcccgtttgtctcctcacagaaatgactcttccttttctcccctagcccctatcatcttctttgtgcctgaagggcaggcacagaaatctaagccatattttattgctcttaataaaggcatttctgaagaagaaaagattgtagtaggtaggtaaacagtctcagagatgggaagctctctcagacagggattttggaagacccaaagtgtgagtgacccttggctctacttacgaggcttggttcccaaagcagcaccgtgcttcctgaagcgaataactgcagattttttatgtaaaataacagtcccttcatcaggtagagatcattttgcttttttttttttttgactgtgctgagtcttcattgtggtgcacaggctttccccagtgatggtgagggggctctgattgcagagtgtgggctccagagcccacgggctcaccagttgtggtgtgggggtttagttatgctgtggtatgtgggatcttagttccccaaccagggattgaacccatgttccctgctttggggtgctgggaaagtccccatttgcctttggttataataagtcttaggtgttacttcttcagcctaagttcagattataaagtactgatacagttttttcagtgtgtgtttataaatgaggcagtggcttgtcatagtggttccgagccaggttcagagagcttgaggcccagcctgtccgcttaccaggtttcctgcaacccaggtctcccgcattgcaggcagattctttaccatctgagccaccaaggaagcccttaacttatttaaataattgtaagtaaattagctgtgggcttcccaggtggctcagtggtgaggaatgcacctgcagtccaggcgctgcaggagacgtgggtttgacccctgggtcgggaagaccctctggaggagggcatggcagtccactccagtgatcttgcctggagaatcccatggacagaggagcttggcaggctcagtccgtatggtcgcaaagagtcggacacgactgaagtgacttagcacagggagttccctggtgatccagtggttaagaatctgcctgccagtgcacgggacgaggttcaggaaggttccttggtcccagaagatccctcatgccaagggcgactaagccggtgtgccaaaactactgagcctgcgagctgcaactgctgaaagcctgtgtgctctagggcctgcaagaggcagcaagagaagccagcacgagaagcccacgcacctcgactccagagcagttcccgctcactgcagctaaataaagcccacttgcaaaaatgaagacctagtgcagccaaaaataaataagttgtaaacaagcagttgggtgcttgctagtatcaccacgatactttcccactacactgggaacagtggtgaattacggtaaaatttagctcctcagggcaacagagattgtccttgtccaagttcatctcgtaaatgatagagccaggacttgaactgtgttatgcttctgaatcaaaagcctgttttccctaccatggggtctcactgcttcggtaggagctgtggttgtgtttcctgtgtgctggcctggcttttatcctcacacttctgtcatcttattctgtgtctcagaatttccaggtttaaccgggctcagagcagctggccctgttcccctcttgttttttggattcttcattgcttccaaatgcattgccgagatgacacttggcagatcttgtccctaccccagtgaaacatctaatccagaggaattagttactctcagaagaagccacaggatggatttaaggccacatatagcagtattgttggtgtttgaacccttgttttttgtagctttctctagataatagaacttaaaaatcacttggaaaatttttatcagtgtatctccttataatgttgttgcctgcaagttatgcataaaaagtggagatagggttatatcatatcacctttttgtgctttacattgtaaaatgtttaaagatactcttagagtggcctagtttaccttctttgccttttggggaaaggaaacaaaaatcagattgttttctgccccatataaaaagttagctgatcacacgtcctccgatttagttgttttgatagttttaaaatatttactgctagtaatatttagcattgtatttatgatcacttaaactttgactcttctgtttgtttgttttaatacatgtgtgtatggatttgtgaagttgacacctaaactacgtttattgtctttcctgtagcctccaggcagtggattttgaagctgtcgcgatcacagtgaaagagctggttcggtatgccctcagcgtaaacccgaccaaccactgctggctagttattcaggcggacatttattttggtaagtgacatgtagcgctggtttgcgttttgtgtttgtagctctttgagaagtgaaaataaacacgtttcacttactattacagtacgttattaaacttgagtcttgtttcttgaccttctctaagtcttcttccaagatgaaattgagagtaattgttactgttatatgtatgcatttttctgagtctttgattcagatgtttttaattttatgttgaccaccttttttctgtttgttttttttccccatagtaagtgatcatctgaaatgctggtaaaacattcttaggaagttaaagtttagtttgcagaattgctattttaaaggttctaactatgtccagggacttgataattatttgtgttcataggaagagatttgttgccacccagttttagcagcagttaactcagggctagtcttatttcatctgtaccctcacctacatcatcctgctctcttctggattatttttgaaacaaacaatggccagttaacaaatatgtctttatttttggctgtgctgggtcttgttgccatttgagggcttttctctgtttgcaaagagcagaggctgctctccagttgcagcgcgggcttcccttgtaacggcacaggctccagagcctgggggcttcagtggttgctgcactgggctcagtcgctgtgacccgcaggttccagagctcaggctcagtgggtgtggtgcctgggcatagttgcccccaggcatgtgggatcttttggatccgggacggagctggtgtcccctgcattattgcaaggcggaatctagggaagcccaataattgccagttttaatgcttgtggttacctagccccacaaagaatttattttcaggatcttaatatctttattcagagtaaattttctgattctaaactatctcagaaaaataaggtctgtttctagtataggcatttgggaaataaatgtctccaagtactaagttctgaactagtaagtttgacaggaaatctgaggtaaaattttggctaatcagtcttagaagaaaacagtctatatagggcttccttaaagtggttgaaataataaagccaatttttctctttcttgccctggctaagtgttgcccctaggtctgtggtttgaatctgctttctcacacatgaagtaataatacctgacccttcacaaaagaggccctgtctttttagctgcatatttaatgacagataatctttatctctgttttctgcttcaagcaacaaatcagtattcagcggctcttcactattacctccaggcaggagctgtgtgctctgatttctttaacaaggctgtgcccccagatgtttatacagaccaggtaaaagttgttgtgcgcttgctttcttcttaaatgtctgaaaatattctttttcctgggcctctttttgcctgagtttcttcgtttccataaatgtggtggtaactcccaaatggattgattgctctaggtcagaccaccttcatggttccagtgcccacagccattgctgatttaacttccccaaacacctcaaactcaacctctccacggctggttcagcatcttattctgacagtctctcctcctaatgaccttcccacaccagaacaaaaacgtaaacccccagtgaagtatccgtcaactttgttttgccctttgagttgaccaagcataaaccctgagtgtcatcctcttttcttttctaatccttccaccaatatccactcaacctttaatgttgattctgtctcttcaatctcaaattgtactcattttctcccagtatgctctacttactgcttaggctgccaatatcataatgtaataaatggcatttttttaatacttgcaatagtgacttaaactagaatttaaaatattttaataattaggtttttaaaattagaagttctattttttagagcagctttagattcacaacaaaattgagtgaaaaataatagagttcctctattcttcctatccctgcacatgtacaacctacctgatggattgacatcccacgtcagagtggaacatttgttacaattgttatcaattagttttttaaagtaatcagaattttgtttttataggtaataaaacgaatgataaagtgctgttctttgctgaattgccacacacaggttagtttataaaattatgatgttggtctattgtctcgtaagttagagtttatagtaaatacaaggcattgcactgggaagtattttccatgtcataattccttaaatttatggcatttaagaatttggcatgatctttaaattttttttaatagtttacagaattttaaccgaaatgaaagtgtgggttacaaaacattggcctttgaaccttagaaaagccattctcaagtatgtctaatatttaaaagtagatatgtgtgttaatcactgtgtgtgggttagtctctcagtcatgtctgactctttgtgaccccatggactctagcttgccaggctcctctctccatgggattctctaggcaagaatcctggagtagataaccatggccttccccagtgatcttcctgacccaaggattgaacctgggtctcttgcattgcaggcagattctttaccatctgagccaccagagaagttccatattaatcatcagggaaacgtaaatcaataccacaatgagatatcacttcacacgtatgaggaggcagtaatcaaaagacagaaacaagtattggtgaagctgtggagaaattagaaccttcatgtggctggtaggaatatacattggggcagcctttttggaaaacaatttgctgcctgctcaagaaagtaaacatcaaattccctaccatatgacccagcaatttcactcataagtatataaccaacaaaactgaaaacatatgtccacaaaagaatttatatgtgaaatgtgtataacacagcacattcattattcataatagacaaaagtggaaacaacccaaatgctcatctcctgatgaatggataaacaaaatctggtagatttatatagtggaatattattcagccacgaaaagggatgaagtactgatatatgctacaacagagatgaatcctgtaagttttatgttgagtgaaaaaacagccagatacaaaaagcttgttttgtatgatcccctttatatgaaatgtccagaataagcaaatctgtagagtgagtgtaggttagtggttgtcagagactgggagaggaggtaggagggaactggacagcgactgctaatggatatggagtttttcccctggggtaggggaatgaaatgttttggaattagatagtggtgatggttgtacaattttgtgaatatagtaaaaaccactgaattttatactctgaaagggttcatattttggtgtgtgaataataattttaaaatttctataaatatttaagaaagagatcagcattatgacctacatatctggttgaaatggatctgtctttaatctaaagcagactggcagcttacattttgccaaaatgagcttctgtacttgccagctgtgaaaggcctaattggatgaatatccattggatgtatgtccttgaacatttaacacttctgtcagttttccattccctttgattttctaaaccggctttttgccagcctctcattcaagtaaagctctaaaaattttatgatttaagttactggtgaaggaaatattgggcagacagacacgtgtaaggatttttaccattaaaattggatggattccatacatacgagctgattcattcagcctgacctgcaaggcctctgaagttagagaatatattcttgacatagggctgccctggtggctcagagggtagagtccgcctgcgttgcgggagagcaggattcaatccctggcttggaaatgtcccctggaggagggcatggcaacccactctagtattcttgcctggaggatcccacggaaggagcctggcaggctacagaccatggggtcaccaagagctggacacgactgagcgacaaagcacacattctggacataagagtcatgaaaaactatccctggaaaaccaggagtcactgttgacactaattacatgaaaccttttttatttttattttttccccaaacttaaacctttttattttgtattggggtatagctgattaacggtgttgtggtagtttcagctgtacatatattctcccctaaagcccccacccatccagactggcttgtaacatcgagcagagctccatgtgctatatgataggtccttgttagttagttatccattttaaatacagcagtgtgtattaccttccctaaatccctaactatctcttccccacagcaaccataagttcaatatgtgaaaccatttttaattctttgtttatgtaggtggcaattttatgtcagttcctcagagagattgactacaaaacagcctttaaatcactgcaggaacaaaacaggtatgaatggtttttaaaatagagttgaaattttctgcttaaggaagatgaaataactgaattctgtttttcagtcatgatgcaatggattcctactatgactacatatgggatgttaccattttggaatatttgacttgtatcctttcattaacatatgtgtgtgttactagaacagttcattttctgtaaattaaagaagtatttgatatcatgtattttctaaataaaacatgaagaacagaacagagactctatatcatgatatgtcatagtattaaatttattattcttaactggttcatttagatcttcatcataaaagaggagaaacagataaaagacaaattgcagtaagttgtttcgtgctttgattcttcagtgatgcacctgatttccctgacactaaaccatttcttgtctcatacagtgttggtgccctcacatggtctgcgaggtcgagagtggcctgactgctagctagtcacttgactctgctttgctaagtcctgctgccccagtacccctgccattctttgagcatgccaagaacattcaccaccgaagtgtctgtaagattttctctttcaggaacattcttttttaactttgctcaggtttctcctcagatgtcaccttcttagaaatcattactttcctgttgttgttcagtcactgagtcgtgtcccactctttgcgaccccatggactgcagcatgccaggctcctctgtccttcactgtctcttggaatttgctcaagttcatgtccattgcgtcggtgatgccatccaaccatctcatcctctgccgcccccttttccttttgtcttcagtctttcccagccagcatcagggtcttttctaatgagttggctcttcccatcagctggctgaagtattagagcttcagcatcattccaatgaatattcagggttgatttcctttaggattgactggtttgatctccttgctgtccaggggactctcaagagtcttctccaacaccacaatttgaaagcatcagttcttcagcactcagccttctttatggtccaactctcacatccatatgtgactgttggagaaaccacacctttggctgttggcaaagtgatgtctctgctttttaatacattgcccaggtttgtcatagctttctttccaagaagcaagggtcttttaatttcatggctgcagtcaccatccacagtaattttggagcccaagaaaatgaagtttcgctgcttccatgttttcccattctgtttgccctaaaatgttgggatcggatgttgatattagttttttgaatgttgagttttaagctggctttttcactctcctctttcaccctcgtcaagaggccatctagttcctcttcactttctgccattagaatggtatcatctgtgtatctgaggttgttgatattttaaagcttcctatttggactaaactctatggccattacttagaggcgacagagtgacaacagcatctttaaaaagagagaaagagacaagagtatgtcgtgccagttccactttattggaagctgctcactctttcatttacaacttaaccagggttggaaggtaatgctgaaaatttctcagtaccctgatgagatatccagattacctctaattttatcattttttaagccccttcttggaagcttaaagctacctccttattagctcatctaaacgctaacctagttgttcctctgcgtgcatcaaaagatatataatcgacttatccagctccccaacattccaagtttcactgtcaccttattcatcagcctccagtatccatagccaggcctttttgacagaattgctctattaagatctctctgccagtaatctgtccttttcttacctcttgactttcgtatttctcatgatcatgagatgttcaggtttcatgaccaagtcccccagactctccgccctttcccagctcgccttctttcctactggcctggagtacagcacattctggcttgtgtactccatggcctgcagccttagttggcccccgatttcctttgtccacctgccagtagtcagtggtctgccttctttttagggaatattttaggtttctctccttttcccatttacagtaacttccttgtgtttgaagtagacaaggaaaaaagactgatcagttcctgtccttgggaaactccttgggagttacggccctgtgagtgccagcttcaaattcctgtttcagatccctacttttcacctttgaaacaatcgccagctggactcagtatgttgatgctactcctttatgaagatatgtttttatgcttttgattctatcccttcagtcattctatccctttcagttggttatctcccctcttatattgtcaagcactcctgttaaacctatgaactatttcatccttaataaaaacttctcttgactatgcctctacctctttctgtcccctctgcctagtttttggaagctcttttacccagtttgatttctcctgtcccccactgttttcaagggacaccaaatgccaaaggcagtgaatacttttcagtctttattctgttgtttacacctccttccttccttgaaattctttattcctttggcttccttgacatcatttttaactccctgactcttcagccttttctttgtggatattttcctgtctaccctgaaacttgggtttttgtcaagaagttagtccttgggtatttcatgatggcccttcattctccctaggtaacctcattcacttatggatttgaccactacccacttagggtgtggtatttctctcaaatatctgcctcctattccaatttctttttaaaatttttattgggatataattgctttacagtgttgtgttagtctctgctgtacagcagagtcagtcagttatatgtgtattccctcttttttagatttcttttccatttaggtcatcacagagcactgagtagtttccttgctattcagtagattcttttttttttttttaatatgtagtagtgtatatatgtcagtcccaatctccaaattaatccccccccacaccgttatccataagtttgttctctgtccagtttgtcttatactttggacttttttagccagttgtcttcaggatattttgtttgaaataactctggttattccccactactaggttttttcacatggattctttcatattgaaatagcattatcagcaagtcctcctacccactaacctgatgatcatttctgaatagtcttaacttccttcaggctacctttcaaatagtctcttgttttttttaaaaaaaaacttagaacttctttaaaggtaattttaagatcttaaaacatgctctcacaaaacattccatggcagaatgctactatagatttttatcaggctgaagtatttctttctaatcatgaaagagatgggtcactatatttagtgctgagcaactagctatttttacatatataaaaagtgaagcccccaaacatgaatttttatttttttgaattattttttagaatctttaaaaaatgtgtcagattacatgcaggtttatttagtgatatttttagtcagataaaacttaaatgaatttacttaatattctgaagataattccacaaactgtggtaattggtctttttcttgagtgcttctagtctttatgttaatttcttctacacctcttagcatctacaattagaggttcagttatcgttgttagcaagtaggtagttttatattatgtatactagcaaagctttgtttttgaccagacctctaacaacatcacttttctgttttggaagatcaaagccatcggccagacagaactgaatgcaagcaacccagaagaagtgttacagctggcagcgcagagaaggaaaaaaaagtttctccaagcaatggcgaaactttacttttaagcagttagttacaatttttaacttttattttttaaatggtcggctaaaaataaacagtattaaaagattaagtttatataatacatatgtacatatttagtggcgttttcttttcagacaatactgaaacatattagtttaaaaatgaaaactatacagaagacttcataccataacaatagcttaaatttataatttcttcaaaggaaaaagagtcacatgttcaataacaataaaccagtaaatctaggataattttctaatctacttttgaggctgacatttcatttttaaaaaaactagaatatttatgtaagagtagctatatacagtaagttcttatgtcaaggttttgttgctttttttttttcttaataaatagatttctaggagtcagtatacatttactgcttttctgccttaagaaaatagaagtttaggtcaagtgttaagctttatcactttgacactgtccttaactcataatgtaagaatttaaa

SEQ ID NO: 136 - DNA, 98719 bp, Hippotragus equinus
  source 1..98719: mol_type = genomic DNA
gataaaagtacaatgcccgtgacagccaacaccatggaactgggctgtatgacgttgtttggaaggcaagggttaaaaaggtagacgagagatttttcaaaaatcacccccaagttgttgtgctgattgaatataagtacaccagatactacagcaaggggaacactgcaaaaaaaggtcctctatttacagagtgattagagacatcatggtttctttacaaacagatgtaagaacaggaattatccactttttaaaaactctacatgtcgaccctccactattactatgatccacggaactgcctgtatcaaggcagtcttttccaaaccttatttgaccccaaaatgaatttccatcgtctctttaccgtccatggtccaggctctccagaaaagtctctgggcacaaatcctaggcgggcaggcattgggcctgcagttaaaaaggaagccatcagaaactggagcccccccaaccctgggacccctgcccacaggtcagtcgtcgctatcagacagcgtctcgtactgtgcggacagcagcggggccggctcccgctcccagatcctgctcggctggtgtggggcagccgggttggccgaggtgggagtgcaggcgacgggtgcggggggcgtgctgctgagcatccgcatggtcagggggttgtaggggaactgtgtcgagcctgcggagagaggtgagcatatctgagcggggttccgggtgggggcagaacagacctccccgctgcaccattcccaagcaaccaaccatccagaaggacacaaagccagtgagcacttgaggctgggctgctgctgaatccaagtgcaactcctggatttttggctcaaactaagactctggtaacacaggaggaagcaggaagttcggggacaagggcccagctggtcagtggcagacagacccagggacaggctgcggagggggacacacaagcctcacaacagcactgccaccttctgccatgcctagattgtgtcattgtctccaggaagccacctacaatctaagaaatgctaaaaccagagcacacgccacagcatcagacacaagaagaaatagtcattggtctaggaagttttcaaaccagtaagcccctactctgcatgtggtgggagaaactataaagtgattaagtgtacctcaaattacgttttataataccaataagaaatttgtaactaaaggagggcacagttcagattttttcattgatgtatttgtggagttaattcctctgaaaagcacagatgaaactctaaaatccacagcaactatcccagttttactttaaaaaatagttcattttcaagatgaccgttatagtggaagtgttcattactcagtcacatctgactctttgtgaccccatggactatagcccaccagtctctgtccatggcattctccaggcaagagtactggcataggtaaccattcccttctccaagggatattcctgacccagagatcggaaaacccaagtttcctgcattgtaggcggattcttcacagtctgagccaccaagaaagccctccattattatcacggttaattcgtaatttttaaaaggttacaaaatggggacttccctggtggaccagtggttaagaacctgcttccaatgcaggggactcagatttgatccctggtcagggaacaatgatgccacaggtcaaccaagcctgtgcagcccaactactgagcataggcaacagctagacaggctgctgcaccgcaataggaagcccttgcacagcagtaagaatgatgtccaagcaccacaaccaagacccagtgcagcttataaatagtcataaaagggcaaacattaaaaataccctagacttttgtttttgtctgtaaagacagcctacagaggggtgccgggtttcttccgtgtttggtcttggttcccattggctcctaagaactttgaggacatctgtgcagaaggcgtgggagagctgaagccacaggccccagccgtgaacctgggtcaggtgccgccaccagctccccacaggtgcaaggggcctgagggcagctgtgatcacagctcttcctctctgctagtaatcaaacattcttaaaatttctcagattatgtaaattcagtttctattaagaacagtggaaccctttaaccataccataatggaaagcattttttagcagaacacctgattttaggagcagcactaaccaaggccttggcgtcagctcatgcggacctgcaccctggcagcagcccctcacctgtcgaggaaggtctgtcctcccaggcccagcccggcgtctgcctgtggtagtccccttctgagtgcacggaggagaccgatgagggccgctccgctcccaggtagccctgccccgggacaggcgatttcgatttcctgctgttagccttgctgagcagctttggtttgcaaactcctcctgaaagtggaataaactgtcattactgacacacagtagtcacattcacaaaccgaaagagcaccccagtgctgctgaccgtctgctgcaggagaaagcgggatgggagcatgaagagtccagaccctggtaacacacgagagccagaactcactcgcagcaactcaagtcagaggggtgtgtccgtcctcatgccataaactcagaaacaggtaaccaagaaacgaacgtttctgaaacatcatttctttcttagccttggagcacaaaactgctaagaagccgaaaactaactgacaaaagtcttaaatcctcactctctctgccctcatcaatctacagaagagtgaagagcggaaggagaaaatctgcacaagagaagctccttcaagctgttggacatcagctgggccgggcaagtcaaggaagccctttctgcctctccaggctgtttagttggtttgcaggactgggaagccctaactgggctctcacacagaacattaaaaggatctcagaagagatcagagcccaggtcagcagccccagcagaatggtttcaccctgcccccaatccttggggtacagaaaaaagggagaaaaagcattttctacccctctatctggagagagaagaaatgcaagtccttggtgatgaggacaatataacacaacagaaaatgggggtggggtatacttcaaacactagggggaaacttcacaatacattaaggccatttacaaacgaagctccaagaagagatcaccaaaatgaacgaggcttatgaaaaggcttatcaggaagtcaagccatgaaggaaaaggaaacactggtgcaaaggagaaatttgagagtgaaagcaacagaaaaaggatcaagacgattaaaacaatgagaagctaacagagtacaaagactatccagcgaaaaggcaactttctcaaatggagaaaataactaaggaacatctgatagaatttttccctgaacacggaaactgggaaggtgcacacccgctctggtgatcagggaatcgacacaggctgaagaacactaacacactgatgtacttactgaagttgaagaaaaaaggattctttgggcagataaaatgtcatcactaaaaaaaagggaggtggtgggggaatctagtcttactttttacacaacaatgaatgccagaagaaatacaaccatgtttacaggaggttttgagaaaagtatgtgtcttaatagtaggttggtgcaaacgtaattgcagtttcagaccgtgaattttaaatcatcataactaagctcaaacagatctttattaattaaaataggaacccttacaatcaacatatttttgccattgagaagtaagtttgtttatttctgtagtgtaaaaatctgtactttgtgattcaacgaactcttggaaagcattttctgcatcttgctggttgtggaagccttttccctgcaaaaagttatcaggatgcttgacgaagtggtagtcagtgggcgagaggtcaggcgaatatggcagatgagacaaagcttcagagcccagtttgcacgtcacagcaccagtgcttcaggagttggacagtccggctccgtggggaactgggctctgtttgccactgccagctgtagttttcggtgcatctcatcgattttctgagcacacttctctgatgtaatggttttaccaggactcaaagctgtagtggatcagacgggacagcagaccatcagtgaccctgaccttttttttggtgcaagtttggctttgggaagtgcttttggagctgcttcttccaaccactgagctggttgttgctggctgtcacataaaacccacttttcatttcatgtcacaatccaagaaatggttcattgttgtatcgaataagagaagacaacactttaaaacaatttttttgtcagctcatatggcacccacttatccagctttttcacttttctgatttgcttcaaatagctgtagaatggtcaacactgagttctttagcaactccttgtgtgcttgtgagaggatcagcttcgatgatggctctcacttggttgttgtcaacttggagtggccggccacgatgctctatcttcaaggctctcatctcctttgcaaaacttcttgaaccactacttatactgtatattcattagcagttcctgggccaaattcgttgttgtgagttgtctccactgctttatgacccattttgaactcgaataagaaaatcgcttgaatttgctttttgtctaacaccatttccatagtctaaaataaacataaacagcaagtaacaagtcattagcaaaaaaacataaagcaagaagtgtgcattaaaatgatgtgtaacataaccacatttaagaaagtattccaatatcaaacagcaaatttcaaccatgcaaaaactaattacttttgcaccaacctagtattgtaatacctgccaaactgttaaacaaaggcagcaaagaagaccttctcgagcaggaaggacctcaggacacagtagcctttttgaaaaaacagggtatgaaacctcaccaccaagaaatgccaggataaaaagactacacaacaagcagaactctgtaaatcaccaatattataacttaaaacacacacacagacatttaaaatcaataaaacttgaaggttagagcagaaattagaagacaagtgtctcatctttgagagcaggaagtgaatttatattgtcctaaagttaacatatatagggaaaaacaaaaccactcatctctttaatcattttcttatccttagtgaaatcttttgtgtgaccataacgggagaacaaacttgaaatattgctgaccttcagtttatttttaaggcataagagagattctcaacagattaagaaaaaagcttatatataaacatataaagcatagagtcatggttttttgtgtgcttataacaggatgtataatgacttcattccagtaagctaccctttttaacactagccttctatacaatgtgatcaaaaggatttttttccccttattttttttctgtggcttaaaattcttttatacggggcctgtcacttttattacaatagcaagtcactttgattcaaaagcagaatatgaaattgcatcagtattacaattacaatgtatgcacacagataaggactacatgaaaacaaaaacactgatacactggagggtgacattctgggtagaaattttcatcccttttatgtcacttataacatgtctgaagaggctgaaaaaaagttgaggtgactgagcacgtaagtgaaatgtctccatgacccatcagaacctggggtatgcactggctttttcttgggggacatggtgaagagcacaaaaatgagccccttacctgagtgaggtgatgggtccccttcctccctccgggtctcgccgctggtcaccactgaggtgctggcgcccccaggccccactgccaccggctggggcatgaccaccccgtgatcctccactttgtcgtcaaagctccccatgagcgccttccggatgatgtcctccagcccaaggttactggcagggtcagcaaaggagtggcctctggagctcacggagcctgcaggagacggcacagcacctgcctgactctgagggaggacgggagcaggaaccgcccaggacacacggcccggcacagtgttgacagcacagccccacagaggcagctaatcccccgagagcatgcgctttcctgtgttaaattaggcacccactggtgtgaaagttgcttgacggttttcttctctttttagctcaatagttctgattctctgttcatttatgttttcaacaagtacttactgaccctcaattcactttttactgtgactgcctccgtgtccctccccgactaaatgatgttcctggcatgcagccagtacgcaatgcctatttgctgtactgactgctactgtatgagttttctgaatcttacctgaggtggtgactgctggcagattaaagatctcagttcctggctgagcagctgctgtatttaaaacaaacattcaagttaattaactgagatgtgatgatcacgtgcacggaacgagataaagtctccaaaaaaaagtctacagtaaattaacattattttccatgatcaactttattttttacccattaagtgaaggtaaagagaaataattactttttaaagtaaatcagaacaggagtaatacagcccaggaaggaaaggaccttctgcagcgtcagagaaacacacgtaggaagaagctggcctcaggacaggaacccaaggttctaggaacccaagcttctaatctcacagccaggtgtgagattagatcctggggagaatgcccccgtgaaaggaacgaacatgaccacgtgtccctgctgcagttgccagggtgaggcagagatcctgcctgttggttctgttcatttctgctaactgtgcagtctgtcatttgctctatttgaatgacagcagctcagacaacctgggaagtacttgtaaagcactgtgcccaaaatggaagaagtttgggaacagaaacagtgtttctatcatgccttccaactcaaggttgaaaacttgaaaaagaatccaggaagtaagttagtagccagacaagcagtgtcccagagaagggcggccctgcaccagggagaaggcctgtccacgcagattggggtgagggggcctggatgctgactcctgggacaaggagacgggcggggaggaggcgcctcacttatgggtcagggaacagtaaaccgactgaacctgaaaacagcacaagggggtaaggagggccttgtagttctcatagaaacctggagaacaggactcattcctttcacaaatacataccattatttgtgaaatgatacaagccatacaaatacaagccattatttggctgaataagaaaatcatgttcttattggtcaaaaatggtcagatgaagacaatttcttattgttcaaccaacaataacatactggaccctgtggggttcaggttagcaggtacttcctgaggccctcagagcaaaatcacctggcagctgagtgaaacgcccattcccagatccctgcattgctctggactgacgggagtaagacaggcttacgagaggacatgagcgttcctcagaggtggggaaaggcagttctacagtgctggaggcaaaccaccatctcagagccctgctgagcaagacctggcttctgaggagacacaaaaatcggccaaagaagcagaagaagaaactggaaacagcagtactgaaaaccaagggaacagcatttctggaaggagtaagttgttcactagtgttaacagcagcagggagaacagagtcgctaagtttagagcatgaaggcttctgcagagtaaaagcactgatgtcctcagtgggaaccctgagctgaggcgaagccatcttggttgccgagggcttggacttctcaaatctagtaattaagaagtaattaagagctgggataactacacaacaagtgacagtgacactgggctaatcccttctcctctgggactttcaacctttgttaatcaccatgtcacagatccaaacataactccacctggcagttcctagttggcagggtttactgatggtggaaaccctgggttctgcagggcttccccagaaccttggatcactggatacatgtgaagagaaggggacgagtgaacctggctgatggcgtgagtgtgaaaacagtaggcaaggaaggttgtgggcatttatgggcagccctggggagggtgtcgagtgctgaactactggaggcatggactctggagctagcacccatgagtctgaaccacagtcccgccacctcaacagtcactaaacccaagcctcagtgtcctcatctacaaagtggagatgatgctagcatgtggcatggagagtgttgtgaaggtgacaggagataatccacattcacgctgacaacagggcctggggcaggcagtggtgcccgggccatgcaccatctgctgccactgccttgaggctggcaccatcctcagttgtgggaggtgtgcttcgaaggtaatccacaaagactcgtagagcaaagaaaggcacaaacaagtacacacaacctggtcccacacttggtgtgacagacacaggacaacagggagaggtatgggccatgggcagctcatcacaggaggctggtgttggtaccaacactaagtcactggaactgaacacacaggtcatcgaaacacccagtgtggtcccagacccccttaagatgatgaattggggatgggtcctaccatggtactcagaacccactgaaaggccaactgaatgaaaggtttttagtgaccagcacctgggatggtaggaatgcttaagagctggctgcctgtgcacgtccacactggatagacaactagaggagcacgaccttgtctgcagacagctggatggtctacccaaatgaggggtagaccagggggtaaacactggagagccaatccagccccacgtaagacacacacttctgagacccacacttgttcaaagagaaaatgggcagctgcgcacgtgctgggtggggctccctcacagaaagcccccaagcagagccaacggaggcctgtggaggagttcatatcacatgtgcttggaccggcctgccagagccctcatactcaagggttacgtgagaggcaacatggagctatcattatttatgcacattttatgggagttcatgaaagaaatcccacttacccatatcagagtcacctccaccagaggagttcaacttacgaaaaatctcttgcttctttgacttcaccatgggggacgtgctctcgagcttggtaaagaatgaaggcaggtagcttatgctgcctggtgagcgggagtcattcctgctgggaacagccatttgttaccaccatgcactcctactcccctccctgccccacccccaccccctgcaagtgccgggcctgaggccctctccgtctgagcactgacatatctggggccaagaggacgtcagaaaaggagccctggagtggagacggtctagaactgagagagcaaacaggtggtaacaggagccctcaaaacagcttgccatgctcccgtcttctctgcagcacagaccctggtgtattgagggtgaccacataatctgggggccatttaaccagcaaaattactttgtgtaagactgtaaccactagcatacctgcctataaaatagcaagcactcacacctaagcagtagacagttagacctaacagcacagcgacaatgcagaaataaaactgcatatttgttagcatctttccaggcctgcatgagtggagtatcatatctgcagcttcctatgctaataaatttagaaacacaagtctcctcaactagctcaggactacccaggagccaactagtgccagagacggtaacagagaacacatgaaaggtgctgataacctaatcgggtccatcactcaaacgtgacaaagaaggtaacaaaaaaatgactaagacgtcgtctctgtcctcaaaaactcacaagcttaggggaaaacatgtaaacatataattgaagttaacatcattccctttccaaaacaggatttcttcctcatttcactgaaaggtaccagcacctatttgggtacctgtgaattatataggggccaaactaaaagcgtctaaacccaatggaataaatatccactaattcacagggtgggggtaagggttagaaactggtgagaaaacagcaagcagtgctcactgcaaccttccacacactgcacatgacaccaggtgcctggcaggctcttcaggggctcaatgtccacacagacaaaaaggttttaaaaaagatccataaggaattaatttcaaggagaataatgaacaattactttctatcatctacttaaatattagaatttcttcagtaaaatccactagcatttgattgctaggaaaataaagtgattctactgacatgattgaaagagaaaaaactgcgctgacttcagggaaacggaaggcaggaagtgcgagcatgcacatgcgcacgcgcacacgcacgcacagccacgcggtgctgcccctacgcacctctgctccgtgggatcggctccacgctgggccagcagcagcacactgtcctgcttctcgtgcacaacaggaacctgaggcggggagatgggctcatagggctctgaagagatgtgactcctctctggggactttccaggcctgatgctgcaacatatgaaatgtgagactgtcttcccagggctcacctcggctcaccctaaacacacacagacactggttagctggttactttagtcatttcagggaacaaaagttgacactgaatattagaaaaaagtcacctcaaatactgtgaatattaatagatcccacttatcacaactaaagatcctgagtgccacagttaaaacccagcacagccaaatttttttttttttaatgaataaaagccatcagtgacctttaatatatgctttcattatcattataggttagtatcgtttgccatttctttccccaatctaccccatccaattagaggtggccattttttaccatttcttttagctctttgattatttagatgatttagaggtaactaccgatcttaggcttcccttggggctcagctggtaaagaattcgcgtgcaatgcgggatcgagacctgggttcaatccctggattggaaagatcccttggagaagggaaaggctacccacactccagtattctggcctagagaattccatggactgtatagtccatgaggttgcaaagagttggacatgactgagtgactttcacactttaccaatggtatatacctttcttggtgtatcaaaacttgaaacagtagctatcagtcttaccacaaaagataaaggacttgactaccttctctatattgattttaatctttagtttgtctactttatatagcctcctcagccatttttatatgattacagcatttacattgttccagaactctagaaaaactcctctgtgttttgcttataggttgaaaaatcaattaatggtattttataacagtatggattatataaatattttaaactataaaacaaggtaatctcaaagaaatgtaacattcctcattcaaaagcaaggtgcagtgatgtggaaaatacaagtgaaaaagtcaaaatgatttgtttctcataaatggccatcaactgttcaaaatctatatagcactttgtatcaagaatgtatcatgaatgactgttacaactttctgttcttctttgataactgaagctcttttttgttaaaagagaatgctttcatcatgtccttaagatcatccagctgcttgagatgacttatgtcatttgcaatttacttcagaacactccagtttgaggtggggataatgaaacacatggggcctgtgctgggtgctggcatgttacactttctctacttctgtatgttcaaaaaaatcccacaataaagttttttcctaaaggagtatcgttcagcttattaaatacactgttcttactcctttatcttactttatcttgtacttactcttctctgctaacttgggggctggcaggcaggctggagaaccaggcctgctacaaaatcaactgctgcttccactgccctggtccatccacctgccatgtgtctccagatatttgcagagtccttgacctgctgaaccccagactcgttctcatatctttatgaacttgacaaatctgtgtgctgcttgctctccatcaactaacatgcgcaccaacactcagtccactacctgcaacttcccagcgcagagccctggggagaacactggagagagccctgtactgagcagcctcacattattcaacgccagcttcctaaacatctgaacacactgtgattctgaagacccaacattaccaaccacccatgccacagcactgtctgcaaacccacagacaaaggacagcaatcaacttgtggacacataataaaaacatataggaccaactgcccagacagtggacattccaaggataatatacaaaggaaaaactctcatttacactttccagggaacgaaggtgaagaaactctgggtaagaaatgaatcccctatcgtgaaggtagagtccgactgtctcactgctggggaacctacatgtggccaagggagaccatacctggccctggatttgtctactagagtttctggagagactctcgagcctggtctctgatggtgagcagactgagactgagattctgggctgtagcggtttgatgttttcgtcctcacaggtgtagacaccaaggcagatggtgaactctggaatgtagaagtggaaggctgctggggaggctgcgaggaaacttgatttctagcaaaatcttgtgtgataatttgctgtgaatgagaaaaagaggaactggttaaatccattgagcacttgcaaaaaaaaaaaagtgtaacataaaaaaaatctagatatctttattgtgattctatgtgaaatgtggccttctatgtgatcttgtacagagaccccactaataaagagtagtgaaaaactcacgcagatgtggtcagcaagtgtgatgagccggtgtgtccggggcacctgtcccgccccctcggcttgtgaggggggcggcggcggctgctgtggggccggggactcctgctgcggccggtagtgatgcagtggtccttcatactgtctgggggcttcgtctaacaggggacagacagacggcttactgcagggaggcccacctttcactcatgagcaaagattaaacagctcagagaaacacaggatggggaattcatatcttaattttgaagaaaaaatatttattcactgagagacatcagaagattagcatagaataaaatgtgaaagcacaagtgggcaaacaaaattaataccaactattttcaatatcattagaacatattttaaaagtcactgatgacttaaaaatagtattccattgaagtgaagtcgctcagtcatgtccgactctttgcgaccccatggactgtagcctaccaggctcctctgtccatgggattttcccggcaatagtactggagtggattgctatctagactcatagaagattactctaaaacaaaactaacaaaatgagctatttctgaacatgccctggacagacaacaggaagcacacgtgaagacacaggagacccactttctgcctggctcgccttcacgacctccggctggtaggccgtcagcctctcctggggcggtgcgggagagctggcagggcttatcacctcaatagcatcgccaggtgtttcataccggtgagaagatacttgaagaaaagaaaagaatctattttaaaattaatcttatgtcaagctcagaagttccaagctcttcaaatctatttgcatattttcaggttttactcatcagaaatattcaatggcacctcaggttaatgaaaaaacaaacaaggagctcagtgcattgtggcaaaggtcagttaatcacttccttgggctcctcatcttggcaaggtacagagtttcctgaaaatctgcaggctctaaaaccttgaggtgaagcagatgagaaacagagcttgaccttctgctgggggctgaaaaagaaaatcaccaggaaattcatcacaagagattaaaccaatgagaggagacctcagcagtacatacttccaagtcacttccatccccgatagtctgctcttcttcaccaggacaacttcaacgctgtggattaacatcatgtaataattttctcaaatcactgagtgctcctgacgaaaatgactcccatttttagccccatgttacaccataaacatgaacagaggtggcggtgaatgtctgcagggaggaagggagcacgcgccatcacagcagggccctccaagagatggtgcccttgggaactgagggtctaagcagtgggggtccacgcactttcctcagtcctaccagggcctcagactcgagaacaggggagctgctggggaagggtgtgacctcctgctcaggacccttctgactcagtgctgtgcacacttttgggtgcactgaagcatctgaggaaatgatcagaggcccaaagagtatatgaccctggccagatcagcaagcgtggtcaggtcttggacacagggtagaaggtgggaaagaactcctctactagtgcatcacccactgctccaaccgcagctctacagccctctcccgcccccaccaggtcagggaagctgcaaggacctggctctagtatacttaggacagagatctggtaacaggggtggaaatcagctttggaaactaaaatatgtcactatatgcaaactaactggtactactttgggacaggcaccaatcactgttcactgtttgggtgctgctcccaaactctgctccccagggcagcacaggcggcaggaggcctggtgctcctgggagctcagtgcccttgatgtctggggcgggggccaggaagagggggtttgaggaagaagaactgaaagccacgctgggtaactgggaggagcctgggcgcttcacacaagtaatcgagtcagtgatgaaaataaaactacgctcagaaacataaaccatcagaaaagcagtcagactgcttgcagacattctgtgatgcaaaaaggaagtgatgtcaggtagttagcaagtgttccacaagccccaggatggttaccacgtgtgtgccagtgacttcccgccagacggcccagtcacacaactagagactgtcccaattttctgtaggtacagcaccgattttgcagatttccacagtccaggctaacagatatctttcatggacacatagggctaccaagcttctctccagacctcagccatggggctgtttacccaaacaagtcaggatcaggtgcagactagccagaaccttgtattgcacgccgggcagtgcacaggaccccactggtcacagtctccgactctactcgattcacgaatggaaatgagaggttactatgtgtagttacattacttcaatactaagggatatgtgtttaaatacttgccttcagaaattcaatagagaatttaggatgtagttaaaaatacatttaaaacaatttttctagcattttactgtaggttgctaaattcttacacttgctcaaaatccaacttataagaaataccaattaccaataaccataattatcaataaggtggtcttttaaaaatatctgtatcttagaaaaaggttactagtggctttggggcaccaccctagaccctgatgcacgccttaggaagttctcctgaggaacaaggtctcgaagtgcggagcgtgtgacatacccatttgcagaacctgaaatgtgagtggctctgcctctgtctgcctccctgtggcttcatccccagaaaggccaagttcctcaaggaaacacatgacagtgtacttaagatgctcagatacttaaaggcgtaacagcaggagagactttcgtgcaccactaacccacacaacctctccattacattcacaccgtgtgcttcgcttcccctggagtcaggtgactccatgtgtggtgccgtggggcgggctcgggccgagatacatacagctactggaagagtctgagctctgggagccacggtccctgctgtccttgtccgaggcaatctgccgggtgatgatcacgtctatgaagttagctgcggtaatggtggtcttccctcgagtccttagctcttcctcatatctggacttgggaggaggccctttctctttcccagcctcagagtaaattactgcagagtgaggctggggcttgccactcggcagggctgaagaggtgtacagacactgaccggctctcttctccgcctccaggcttttctgctctagctgctgctcactgactgctgccctgctcctcacattctcttctaacctggtggcgtcgtgcttactctctttcgttttggacacatccatctggggagcagatgcagcagcgtccacaagagcagccagggcatccgcagcggtgttgtaacgggaggccggcaggccctgactgatggaagggcccccggcaggcagtggcctgaaaagaaaaccaaagcacaagtctgacggggagactctcccggggtgttggggcgtcaggaggacagactgcggtgagcacagtgtgcaatgctattgcagtcacacgctgatgagcatgtgcagcagacggcacgtctggtccgagtgcacacagaggcttacatgatccgcagctgcgcgctagggtccagtggggtgatcacgctggtcccgttggttccctggaagacgctgggtctctgctgcagcagggtctcctgagctctgactgacggggatggggagcgcacatagccgtggctgctgggccggccaggctgctccgagcctgcggggcagagggatgcagggacgagccatcaggaagaggctggatggcagcacagggggtcgctgacttcctcacattcccaaacagaagacaggaaagcaagtggagaaaatcgcgaccctgctttctggcctttcgagaaatcaatgctctaagagttttccaataaagatgcaataaaaccactagtaacttgagacaaaatcgtcagctaccactttactctcattcccattcctgtgacaagtctctatcttgattccaaagagaaacaaaaaaccaccaatactgaagcactaattcaaatcaggaagttagtctctgacttttcctcatactctggtgtgtttcttatttccaaaatcaggtctggagcaactgtctctgaatcacaatgcaaatgatgagtttctgctgcagcagggccgaaggctgcccagcccgcagctccgtggctcctccacttgaccatggctcctgcagcaaaactccttcactcacaggacctcaagttccttttcctcactctctcctccacctcctcaggctctcagactcactctttctcacttgaactggcagttctagaaaacagccattttttttcagagcaggtatcacttagcacagccattccagcaattctttcctgtctgaccacacagcagtttatgtgagcattcccacaggagtgcattcctaggactggattattgctcttattttttatgtctctgaaaaagttatccctgtttatactaccactgacagtgtgtaagaggcagtgtttcctcaaacaccacaatactatcaacctttcaaatgtctgatggagaaaaatgatgtttgctggacttaaagctgcatgttattcatcagtgggatcacaagcatttttaaaacatagttcctacagacattatgtaggatttgtacctggctctcttcagttaagtcaatttctgcagtttctgtacaacaacatacaatcaatattacggtgccagttcatgatccacttcccaggtggctcagtggtcaagaatccaccagccaatgcaggagatgcaagagatgcaggttcaattcctgggtaggaaaatcccctgaagaaggaaatggcaacccactccagtattcttgcctggagaaccccaaggatggcaggctacagtccatggggatgcagagagcaggacacaattgagtgattaaacaacaacaagaacagctcatgattcattaaagcacctcctatgatcagacactgagggatttcttttacatcaatcagacaaccttctaagcacactctgcatcctccctttacactccaacccaaatgccacacctatcttcaggaatcttctgtgagcctctgctggatggcttcagctttaatgagctctgagcccagcgttttcagacccaactggtattgctaaatccaaatgccaccgtccacacgacaccaccactgcctccgccctgtctggctcctcagcagcctatacacgcaaaggccccgctgctgtgtctgagggcatcccaccctgagcacgaggctagtgcctccacccacccggccgcaggtagaggtccgaggaggccgtggcaaggcgctcccgctccttttcccgctcccgctctctctcagcactggccgcggctgcgaggtgtgtcgagtgtcctggaaaacacacaaacctgcagcctgaggacaataacgccaacctggcaagtccatcaaacaagctttaccttctcaagtgactgaacatttttctgaaagctccaaatctgagcagtaggaagtgtgctttgttaacagtttcagtgaaaatggagcataacatgagctcccaggagctctcagaagatctagggacagacattgtggaggacctatgactagacagtaaacgaaaaacagcagactgactgggggaaagtgcccaaacacccatagaggctgtgctggcaacacgggagcacactgctcccagcagagaggggcgcacgcacacccacctggactcacggacgcagagctgtaaggtctgggtgggaaggtgatctgtgtaccaggaatatatgtgattctgtccatgggcggggtgcttgtccccccggggtgaggcactaaaattgctggaggcatgttggtcaggtcaatgattcctgctcaaaagaaacaacaaaattacgtttcaagtgttattctaaagatacagaactgcacatggctcttgggcttctctaacccaaaaataatttgcatacaggacaaatacagtgcttaagttcagcatgactctgaaagacctgcttcaccaagaggaacagatgaacactgccccaccccccacaaccgccctgtacatggcaggagagagagtgaagctggcgagaacacggcttcaaacttcaaggacatcgatctggcattgttattccagtgctgccaaaacagcctgttttgatgtatcaccctgtctgccttcaaggctaacagccacagagcctgcttttccttcctcccatcatctgcccaccaagcactagtcctgggcacagacacacacccctggtcgctgggtacgggagccccagctgctgctcccggggagacagccccctggccacgtcaggccgcaggcccacttgcatctgctgggaggtgatgtagtcgttgagaatggtctggcgcgtgttctccatcgcgtagagctgatactgactagggtagccggaggtcggtgacagctgcctctggaacaggtaagcagcggctgctgatggagagaggaagacaggcatgtagttgagtccgtgcagaatccacttgctaaacatcacccacagaaacagtaaggaaaagaaccatctgctgagctacggagcacaatcagcttctacctacctcagggttggggcggggtgggggggggacggacacaggattacggcagattctttttgtaccttgacagagcagcagtgtgaatataaacatcctaatggcagacgtaatgataacagggacgacagaccagacaaaacaagactattaacctttaccactagaacagcagctaaaaactactctcaagtagtttcactttcagtctttgacatgtaactttattagattttttacctgaagtttccaaaagctgtgtttgaaaaaaaaattattttttgtagtacagatcatctaatacaaagaaatggaaaaatttgtaacaaatggtaacattacttttgggggggggcccactgaaaatgaactgtccatgggcatttaatcagtgtgtgcgtgtatagcagagattagccaaagggccggatgatcaatatgtgaggatttgtggacactatggacctgtcacactgactcagctctgtcattacagtgtaaaaactgccacagacaaaacaaacaagcaggcatggcttgtattctaataaaactttatttgtaccaacaggcagcagcaggaccaggccccatgacgcaggtgctgggacactgtaggtgcggtcatgagctgagcacacacagtgagctttatacagtgccgggggcccactacatcccaacaaaactgcaacaagagataatgcctctgtcctcaaaacactgataatccagcttgagctcaacaatgacaagcaaagaaaactgctataaaataaaggattatgatacacactaaatgaaagcataaacattcacttctgtctgagagtttgagtgatatagtttatgcacacattttctcctgagaagaacaaatgacaaactctcggagtgtctgctcccccttcctctagccctcccagccgggtctctcaggcgacagtggcgggtaggggtgaggctcccgccccagctctggggacaggccctgaacgatcaggcatgtgtgcgtgcctcagggacctgacgtttccaggtgacagacaatgtgatggtactgacctcaccacagtccaggagagacgctccaccacctgtggacaggaagccctttcccgggcagaacccactggcctaggccccacagacagcactgctgtgccagggaaggctgccctccagaaaacctacatgcttttacacctactaagaccatgttcactgacggtcagtggtatctgtttgaaagttccttccagctgtacttgctactacaataatgaaacaatgaaaaaactacgctgctgctttggaaagactcaatacagaatctgaattagatatggactagataattttaaaagatgaggaaaaaaatctagaaggatactgtatttattgatagattcctttggtgtgtctttaaacctcaactccttaaaaaaacaaacctggagatgtatcatttacattcggaggaactgtgaggtataaccagtgccctgactagagatcagaacactggtgaagaaagtctgtgttgtaaaataaaataagaaagcctgtgttatttaaaaatagttcttcacgtgaacccactttccaatcaaataccatcacacaagacggctttccacgtacccagtattttaattctttaaggggtgctggtaatattctgtgtcttgatttgggggcttgagctatagagtttgtgaaaatccactgaactatatcctaataacacacgtgactgcctgcattctgtactttaataaacagaacgtctaaagaggcacacagccacgttactgctctgccttcagttttcactgcgcactgtgcttaccaggatccagagcccggtgaaagggcatggctgggtccaagtgtgctggcaggtggctccggtacacttccccgggggtgccgcccctgtggtgcggctcgaaggggctgtggctcactgcagggtccacaccaggcaccggagacttggctgcgacgctctccctctgggtaggggtcagggttgacttcctctcatgattagcagacttgccagaagaaattgtaactagaaaaaacggccaacaccacaaatccttaagcaagcttgttaagtaggataatgttaatctatttctcaaccattccaatacagaccatatacatatatctctttgatcttctctttctacaaaacatgaaacaatcaatcttgcagaacatgcgggcacctctgggttgggagactgccccctttcaggtcacagcccggtttatcacctaaaattacgaatgaaagtcgacgctcagtgctttgtcatctctgacctgatacactaattcctctggaccctgcccacaccaagcctccaccctctctctgcctggctgcccggctccttgctgggtcacacagtgttccctgctctgtgcttccacacagacttcctcgccagcactggcctgctccctgctccagcttcttctactctacaggacattattcagaagtttcattatctcattagtgctactgagtccaaaccaaaaccctaccagtcattaccttccactgtttcagtaactgtggtgaaacacacagaggataaaatttacaagtttggccatttcatagggtatacttcaacaacagtaatacacaacactgtgcaaccatgctgctgctgctgctgctaagtcgcttcagtcgtgtctgactctgcgaccccatagacggcagcccaccaggctcccccatccctgggattctccaggcaagaacactggagtgggttgccatttccttctccaatgcatgaaagtgaaaagtgaaagtcaagttgctcagtcgcgtccgactcttagcgaccccatggactgcagcctaccaggctcctccacccatgggattttccaggcaagagtactggagtggggtgccattgccttctccggtgcaaccatgagcaccatctaattactattttgataatatcaactttgctgtgatcacacaaacgtatgtgtggaagccgagaaatcatgctggtttatcacctcccctccctgccgcaactcgctctaacaagcagagcctctccctctgcagggcaattctccttcaagaccagaaccaacagggtgtaggtttacgccatggccccgatggacatttccctcttctcctccctctgtgtggcccctccaaccgcccacgggagtctgcacataagccctcaaataaaggagtactgcgttacaatctaaaatgctcagtggaaacacttctaagggcctcagattgttcacagaccacctggtaaaaatccacgcctctcatgccccagatgtctctgcagcagcatgaacccctaggaggggcgggttctggtcataaaacagaaccgacagtaataatatttcacaattaccgagtccttcccacactgtgtgtggcacattctgccaaagtcctttcaacacatcacctcattttatctgcatagcaatcctatagggccagccttggtattacacctccagttcacagatgaggacactagagcacagaaaggctaaggaacgtgtccaactcagtgcaataagaacctcgattcaccctaagcagccagcctcatggcctgagcactcaagacagcagacacacagcagacagtgaggagagctgaccatccagaccgacttccagaaattctccggcttagctgaaaatccatgccaagcatgacctgttccaccatttctggactccagtgcaccctgcacttaatgagaacattagacattttacttgcaattatgcctattttcatgggcagccagtctcccagagcacagcagacaggctgcaagcccctggaaccaacaccaggccaagtgctgcaggggacagcatgaatggtcagatagcatatgagagcaacacaccttcagaagctctgctcagcatgggcgagccccgggacacggtgctggcgtagctccccggcgtgcgccgtgcgctggcatcctcataaatccctgggctcagctgtgctttgggagcttcatggagagtggacctgaggactgaggggccagagctcaccaccgacgtgtgccgggaccgcacgggctctcctgccttcacgtcctcatacttgcccctttctaccactttaacgttctcgggcacaatttccagtggaggcatcccacggggcagtttgctaggcccggtgatcagggacttgacattgtgcttgatggcagattgacccgagctgctgtcaaacttgatgggtgtgccctgtgggtcaaaagacaagtgttacaggcagccctgtggctgggctccatctcaggttccacactggcgtgtgccaggaaaggactgctgagtgcccatgctcccagaccagaactaaggtcacagagacctccacatttactttcaggagacccgatgtttaaaatgatctagaaccactgataactactgctgcactatggtccaaagcggatggtacctgggagatggagccttcaatgaccggccgagcgctcggcaccacctcgggggttttccgactctcctgagccaacacatcctgccgggggatctcgtgaacggagcgccccatctctttgatggtggtgatgccatcgtagggctttcctttggtgatggcaccttcaaaagctcggatgggtggactctcccttttaatctgtttggggtacttaaggccatcctcgaaactttcagtggtcgctcttggtgtgccttcaaagaaggattcaagaaatacatttggtaaattaatgccactgaactatacacttaaaaactgttataacagtaaattttgtttcatataaattaccacaatataaagaaatcaatgccttgctgtttgcagtttctaatcagttttctgtttacagtaagatccttatgtaaatattcatttcattggccattatttgggggggggagttgttcaagacttaatgcatcattcagcacaatcaagagtggttcttacataatgaagatgtctgtattaaaagattaagcaactatcatcttcaaataaactatgaaactcagagaagagttatagttagggtttaaatacctaacatgtaaaaagggaagatatcttgaaaaacaggcttcacaccctgcacgttaatttcaaactactttgccccgagacagttgtgaacagaagcaaacaagcggagagttaccatgcatgatggacccagacagcacggtcctgtccttgaggtcggagtgagggctccccctgggtagcgcgcggcagatgagcccttttaaaacaagcaggcggttccagtgttagatacagcatagatgtcaactcaggcacacaactaactgttctaagaggacacacttctgacaaaagccccatggaaaaaggagaaccattttagatttgcaaactattcagaagaacatcatggaaaaaaacagtaaaagctgaagtatccacttttaaaactgtttcttttcaaacatttttgcaaatagaaaatggccaaggaagaagacatctaagttaaagcatagagaacaacactttcaaagctaagtctaaattctcagtgcttatcaaggtgacagaaaatacagagggttagggttaggaaatcaccgttaagttctgaagagaaaaacatgaaagatagatacccccaaaacagataaaatacactaaagatgcaaaccaaaatgaaacacacgtaaataaccttttcagaaatttcatgttacattgccaatgaatttgaattgaggaaagtgagaattttttaacaagagaaaattcagcttatagaaaatttcaataggccttcaagactgaggaatccttaccctgcttcccatttctcatccagattaaaatagaatagttgagtcaggttaagacttaaggaaaatgaaccattcacaaaacaaaccatggtgatcatgtgatgaaggcaatgccacataatcagcacagggctgtacagctgtttttcctcctcacatgactgcaggtacaagccctcaactgacagagcaagagatgggcacagacagacgcaccagaaaagagcgagattcaaatacatctctactctgtatgttatataccactctgccggccccacaataaaaacaaatgctcgtgatgaacttcacatttttaaactcacttaaacaggatcaatctacaaattacatgagcattctaacagttacctatgataagatcaattttgtctttacttcccccttcactgtcatgtactgcttgatttatatgtagtgatgaacatgaatttaaatgtttactaatatataatatataactttcatgttagtatattaattactattacacactttatactacacgtatttataatatattaacatatttatatgtttcatttatatactgatacaaatttcaggtagaaatgacagatattaaatgtaacctaacccaacaatgcaaattggctgtacagaattaaatgtatctaaacagagctctggaaacactttaccctccagcggtgctgatacgggagactccctcatggacaacccttgttttattgttccttccactgattcatagcttcttttgagactgatttcatgagctgctctcggactccttgtcccttctcgggcattcttaatatctgcagaacagacacaagcactgctcggatagagcccaaggcctattagcccaaggcctaagtaagttactttaacctcatgatctcatgaagatgatataaaaactggtcttaatctactacatacctacctctgtgtagatgatatttataaaaatgttttcattcattcaaatatatttactgagggtcaggcataaaccaggattgcagggtgtaaattaggtcgcttccctcaaggaacttaacaatagtgatgggtccaggttaactaacggcagttatcactgagtaacaggtactacagacagcaggcgatcaaactgctggaaagggatctgggcatatgaaatttgggtaagggtcactggacacagcaatgcaactgacgataatcatcgccagctgagccagggtgggcatggtggaaaaaggggagacgcatgtctgggcaggacagtgcagtttcagcacactgctcattaacagtgcacaagctgaaacttaaactcatgaccacatctaaagatgaacgtttagagacaggcattaaaacagttacatttaaggtgaatttaaattcaatactctttctaggattatcagactactatctactccttaacaagtaaaactggcattcctttaaaatagaagggggtcaaatcgcactcacagggacttgtttttgctgagcagacatttagctgtggttctattaaacagagattcttttcctaggctaaatctaatgaccacagctggcagtggggagccaccactcaggggacacttactctgggctccacgctgttaagcacttttcactgactgtctcagttaatttttcatcaaagtttcaagagaagtactcacgttaaccctttttacattacagaggggaaagaaaactcactttcccaaagccagcaggtatggggctccctgtcacatgtgacagcaccagccttggagtagagaggctatacttactatcataggataagatgtgtccacttttgccttcgtaaataacatggcctttggaggcagcttcctcccggcctttctcaggactgctctcttcaatggacagtctagaaacaggtcccttcaccaatgcctcagtgggtatgccagcctgggacagagccggggtcccctgccattcaatcagacacaggcagcatgagcatcacttcagctgacaggacacaaatgctcagaaaatgtaacctgccacaccaagcatcagatcaagccatgacctcaagaaaggccagcacatgatgggaaaccagacatgttttataaacataaagaaagactgtaccttggtccttgaaccctgtcatgcaaaacttcctaaaatgccaataggtatgagttgagtcagccttcttccccacctcaaagtcaaaccactatgaaagcacttaactctcagaaacaaaatttgtcttaaggcctaaactcatgcaaatgtaatcaagttttttcaaaatttataagaaaaagataatgacaagttgtaaaagcaagcaatttatgattttcctctcaatttctgtttaagctgaacacatgttaaaagctctgccaggcagagttgcatcaattataacttgttttttctgccaatctgcaaataatccacctttttcaatgaaacacagtagagatgatctggcttgtggtttatcatctgagacctgtcccaaaccccagaacaatgaacaactttggccaacccacttgagacttcacttctggttttctcaccagctgtggtttgggtgttgggaaggagaactgacctgggtgatggaacctcggagggacgggatgctctccacagagagtttgctagagggcgttccccgagttatgcttccttcttgaatggctcctgaggtacctggataacaacagaatcatcagccaatcacacccccacacctacaaaaaaaacaggccaacaaaaccagcccctgcttgggagagaagagaaaaaaaaggggaaccgcagcacaaaaggaacagtgttttactgaaacatactttaaaaataatttcacaatttttaaaaagcactgcagaaacacacaatttcaaagttttaaaatgatttttataaggaaagaaaacttaaacttaagaatttaaaggctctaatttaagagcccatctttaaaacatactactgacttcccttaacccatttactggggaccagagtatatttctgccctacagtgtgtcttacctctgaccaccccttcgtgctgggctctgaccaataaaccctcaggctgtgagttctggcttcggggagagaactcctcctgcttgatgtagggtatggtggctgtgggccagagcaagacagagtgagctcaagtgccaagtccccgaatggtgcgccacaaaagcggctactcctccccctcctcactgacctggcttggtggcctcctgctgccgtggcagtcccagagagatggagcctgccgagggcttcgctgcctcgggggcgtaggaggcctgattaggagaaggcaagtaagtgccgggtgttccctaaaaataatgttaaaggactagaataacactgtctcttcacaaggtcaactctagagttaaggtacacgtttctgtttagaaaacttaccacccatccacccccaacaccaaaactaagtttaaagcaagaaaatcctcattgcagattggttaaattttaaaagcttttaaaaggagcaagacatcttccaaaatcaccctaaattttaggtagattgatgtgtattattaacaaattacataactgaaaacacttaaccataccctcagatgtagctattattattaactgcatttatccctcgaaaaaatggtggaggaagaacttctaaagaccctcctccacaaaggcaaccagaaaactagcaggaaggttaagaattagccctttaagagctcttttctaactctgtaaccaaagacctgtagaaatctaggaccacttattcaggaaaatggcgaactctggtgagaattgtgagctctatgacctgtgaacttgctctgctgacccccactgccggtctgcttcagcccttagaacccacagctctggtcacatgaaagtacagggggtcagtctcaggtgactgtcatcatcagactggccgagcagttctctgagagaccccacttggcaaagctgtcttgatctggcctgacggggtggggaagcaggtgtaggcttgtcagaaacaattagagtcaatggattaacttctcccctggcaaaggcagtcagagcaaacaatcaggctaaccataaactgtaagagggacgtccctagtagtccagtggttaagactccatgtttccatggcaaagggtgagggttccatccctggtcagggaactcagatcctgcatcctttgagggagaccccatccctccccacaaaaaggaaaagctaaagaacaagatgtccacaggggtctgcagaggtccaacatctccctggggacctagaaggccatacacatgtgcaggctgcacaccggccaggggaaactccagaaggccatgtgtcctcactgtgtgtggtcccacctcaaggctctgtgatagcaggcagtgttgttggctgcctggttgatgagtcccttggtaaagactgggaaatttaagtccttccgggcacagagctccctgatcattagctgaccactgattaagcaaacagagatctgagtggccacatgacactgtcactcaatttggggacctaactcaaacaaacctgcctgcgccatggaaacaaagtgactgctgcatttttaagtcaatgtctcgtcataaatacttttcatttagactctggcaaataaatatgggagggagggaaaatctttacaaaacagtaaccaacagagaatctcctcagaagagaagtcctcttacctgcgagatggagcctcccagtaaaaacgatggtttctcggaagccactgtggttttggatgacgggatgagaggcggcggcggccgagtgggccgagttgttggaagccgaaccccttcagggaggttagttatcacctgatgtggagcaggctggaggacttttaaaaggaagaaaaaaattatttgaaatagtcaatttcctagtttgtgatgttccacctatctcaattatttcttcaatcacagttcaattgtaagtacaagatgaattcgagggtgaacacttctattttaaatttctttcacttagattaaatctgtatccatactcaggtcacaaatggtatctgtgacactgaaatactcaacttcctgtcaaaccagagctttcaggctgatgtccatttcagactatttctgttcagcttatgcaaacagcagtctttagtgatttcttctctctctgcaccactccttggacctcacacaggaggtgaaaagaagggtgtttcttagggacagttgatattacaactctagaaaatatacagatatgactgacagccagttatatgtcctctttgcatcttgcataatttgagaaacatttactgattctgactctcatagatatttgaatatttcttagcagggggtggatctcaagattttcacaaagtacatgtactcataggagaataggcagtcaacgtcacggtacacaggtatgaacacaaacctcccagtggcccagtgaatctcaactgaatacaactgaagatgggatacagagaaacaagaaaggaattctgaaatagcggggacatgtcctgggaacaaaccacccctgccagcagtgtaggtggatggccagcagccacggcaggagggtcggtatttacctggcgggccactagagcgggctgcactcacactgggctgcggagagagcctacacggtgacgctgacctggccgcggtactgtgcatctgtgcctcctgctctagagcacgtgtggcctcagcatagggcatataggcgactgattttcctatggaagttaaagttaccaacataagggaagaaccccagattgaaagagcaagtgtgacaggaccagcccacactgtccggaggcagatccaactctatactactatagaggtctaggttacaaaaccctacacacccaaatcttctgtgtaagcaccagtactctgacctaatgaaatccacaaaaatccaatgacaatttcttctttcaaagcacagagaacttctctgtcctctcattaggatcaatatttcacatgcaataaagatcacaacaggcaaacaacggattatccagccattctatgaattcaggtataccctgaattagaggccagaatgctgaggatttcgacttttataattagcctgttgaagcccactgcttaggtattagagaaataaatgcaatcaagaagcggaagaaggatttcaaaagatgcaaatcaaaatcatttttaatggctatgcaagcttatgaattttactgtaacaatgctaatgaaaattattctaatttacctccacatgaagtataaaaataaactttaagcatttcaagggcatatcagatatgtagagtcatattaagaaaaaacacaaatatatataattttctatattatatatatatatatcatcttttctttttttaaaggaagtaaaattgacatagtataattttagaaaacaaagtaaaaaatcatctgtaacctaaaccactttaaactgtggcattttaatgtttgccatcttttattcttttgcttacctagttttatccacttgttctttcagataaatctaaatttaaatcattttgagtatgtcccccacagtgtatcactggaattttaattggatgtaaatttacaggagacttgacattttatactgagttttccaattgaggaacattgattttttcatataggtcatttttcataatttcatataattttaatagttatttttttattttgttgtgaggaaaaccatctgtttagtatacacggaaaaaaatatatatattttacacactgatttctgcagatataagaaagataaatatagatctctgtatatcaattttttctgagaaacttaatgaactttcctcttagctcaaataacttctcagttaattcttctggcttcctaggtagataatcttcccctctggaaaataacttgccttctcccttcaacagtagccctcttgcttgattcctttctcccttaactgcagtgacatggcatattcacaggtcctttctaaagagaaggtctccagcctctcactgtatagtggaaggtttgtgactggtttcaagtagagaactgactagcacaattaaaatgttctttagcttattaaggtatttttaaaaaccggaaacagtgaaagtaacgtcagctaataggaatctgtactatgggcagagcactgagactacaggaagcatctcgttaagctctcaggactaatgagatcattaacaatgtctgacagaggactgcaactgaggctcaaaagactcacaccctaactgcccaaccaaggctggagactttcctatagcagtgcagttcctggcctgagctctgagccgcagtgcagtgatggcttcctgagcactgggtacagaaatttcagatgcctctgggggcaccatcaggatgatgctacccattccttctctgactgattagtaagtgtcctaatactgtgcagatttacgaaataaaccaactacaaaagaaaatcatgtctccctttctagacaatttaacacgagaacacattatatatattcagtgaagaatggctttataagtttataaacatgcagaaaaataaatatacttgtcataagagtgttaaataaaaagatgaaattttagatggttctatatacaaccatttagtcatcacgtactcagttgaaaaaataaaaaagataaactatagtccgttgcacagaagcataaactcttattttgattggattttgttaaaacctgcattagaacttcacttctaactacctttacctgtgtcaagtctgagttctttcactgcagaaaaaaggtttccaactaaagcaggagtcaacttgtgtaaatgttactggaaaatgaaaacaacttttctctgaggctttttcaagcttttctacaaatggaaaggcttaaactgcctgtctcaaagagaaggtgaacacaatccaataggtggacaacaggtgctgcgtgttaccttctaaatgagcctgtgaaaggaaaagccagaagtgtgttcctacttcacatggacaacaccagttggtaatggtttatacgttagaactcattctcactgtatttaccattctataaactattctatgatgctgcaccgaaaatattcctatcaaacgttctacacacaagtgaattaactgcaaacatataaatgttatttgggagattatcctttaagcaaactacaaaatagctataaattcaggagagccttcagcacttgttaaacaaattactggatgaacatactagctagattagctaaaacaaaacttaaccttggaataaaatgtgatcaaccacctcagtttgtagagagtcaccttgaaccaaagtgatgtcatattaactaacactttggtgtcatactgatcacataaataatgacagtttgggtttaacaccactgcatcactatttaaaaaaggataccattcagatctaaaccacatggattaatgtgactgatcatggagaaatgcaatttgcagtctgaagtctcagaacttggggctgccaatacaacccactttgtaacggagatcaacaaaaaagcctcagttcttgaaacaactatacagacatattagaatgattcaggtgttgtcagctgaataatgctaagctttagcataagttcagaaaacactacttgaatgttattttttccacattttaattctgtttcaaaaaaaattattctaaatcatttatgtaaggaatagatcaaaagacttaaattattctacaatttatcattttcatactgacagatttttctcatcattggaatgctcaaaagacaagtacttctgctaaatccatttttatcctactccatttaaatcattcctttaacatgtaattgctgagtacacattatgtcaattactgagttagggattaaggattctctagaggcaatatactaaaagctcatgagttaacaatatttcttctattttcattcaagaaatattcatttagcacctattatacatacagctagcaaaatagcacctattatacatacagctagcaaaatatctatttctgctttactgactatgccaaagcctttgactgtgtggatcacaataaactgtggaaaattctgaaagagatgggaataccagaccacctgacctgcctcttgagaaatctgtatgcaggtcaggaagcaacagttagaactggacatggaacaatagactggttccaaataggaaaaggagtacgtcaaggctgtatattgtcaccctgcttatttaacttatatgcagagtacatcatgagaaacgctggactggaagaagcacaagttggaatcaagattgccgggagaaatattaataacctcagatatgcagataacaccacccttatggcagaaagtgaagaggaactaaaaagcctcttgaggaaagtgaaagaggagagtgaaaaagttggcttaaagctcaacattcagaaaactaagatcatggcatctggtcccatcacttcatgggaaatagatggggaaacagtgacagactttatttttgggggctcaaaatcactgcagatggtgactgcagccatgaaattaaaagacccttactccttggaaggaaagttatgaccaacctagagagcatattgaaaagcagagatgttactttgccaacaaaggtccgtctagtcaaggctatggtttttcctgtggtcatgtatggatgtgagagttggaccgtgaagaaagctgagcgccgaagaattgatgcttttgaactgtggtgttggagaagactcttgagagtcccttggactgcaaggagatccaaccagtccattctgaaggagatcgaccctgggatttctttggaaggaacgatgctgaagctgaaactccagtacttttggccacctcatgcaaagagttgactcactggaaaagactgatgctgggagggattgggggcaggaggagaaggggacgacagaggatgagatggctggatggcctcactgactcgatggatgtgagtctgagtgaactccgggagttggtgatggacagggaggcctggcgtgctgcgatccatggggtcgcaaagagtcggacacgactgagcgactgaactgaactgatacatatagccgtggtgggtattaatctggttcacatttttaatagtctaagatttatatttaaaacactagcaatcttatatgtaaaactctgccacaggaggttcagtaactaaccgtttactcctggtgggacagggacaaggagtcagcagggtcagttaagcaccacagttccacttttatattaaacagtccttgaaatgcatggtgttctatagctaacagcccttatcttatacaaggtactaccaacagtctactgaattattacaaaaaatgaaaccatagtcaaagaagactttaatggtctcatattctaagtgtgttgtaccaggcagcccatcggttactatcgaccagactactactacagactactgactactaggtgccattttctaaccacaacagaagaatatactaaaatttagtaatggctccctttcttcttgttttaaaagaaattaagtgtatcatgcaccaactaaaaagaacatgcacaactcaaatctgtcatttgaagtaacaacagtgacacacaggacaacagcgctcttcaaggtgtctattacactatgcctatgttaatatagtactgctataaattatcaaactgtatgtaaaataatgctgaaccacatgttataaaacaatactgaatgtgcattcattttcagaaaggcagagatatagctagattagacagacagatgtaatgtttgcactttactaaagctgacaaggtcaagtggcttgcccacgaccatagtgaggggtaagtcaaggtcttgatcgactgtgctacacaaagttggtctcatcatatcagagatttagaatatttccctgacttgcttggaggacaggttaattctcactgactctgaaaactcagatgaacgcaacagaaagaatggccagtacacaatcatcagcagtaaagtgaacatcacaaaattcacattaacaagaagtctactgaaaacatcaccaccatccttcagtgatcaaaaacactgacatcccttgacaatctaaccgaggttaaggtaaggaagtgtatctgtcaggacagcgccattagccaggtttcaaattcagctctgtttcccaccacctacacccgtgtcctgggcggtgcgtgcactacccaccttcccagtctctgccgggactccgggcggcaccacatgggctggtggagctccgacactctaggtccagctgctcctgccgttgacgctgttcctccaggagcgccgactcatgcatggcttttatgtgccgctggtagagggcatagccgctcacaggggtcccaatcgggatgttacacggggtgcaagaaacctacagggagaaaaaaatctaaatatgccagacaccaactaagcagccattaccatctgttgcaagtaacccttatttctatataatctgactgcttgaagtggttctaccatttttttaatcaaagtaatcttcaagctttatgcttaaaatgctaaacaattactttcagatttgaacacgagattaatcccaaagttgtgttgctgctgctgctgctgctaagttgcttcagtcgtgtccgactctctgcgaccccacagacggcagcccaccagggctcccccatccctgggattctccaggcaagaacactggagcgggttgccattttcttctccaatgcatgaaagtgaaaagtgaaagtgaagtcgctcagtcgtgtccaactcctagcgaccccatggactgcagcatatcaggctcctccatccatgggattttccaggcaagagtactggagtgggttgccattgtcttctccaaaagttgtgttaagagaaatcaaagtcagaaatcacagtatttccatctgcttttaactcaagatgttgacccctggtggctcaggtctggcccaccctcttcctgaccctcataggtgctcacacccacttctgtggatttaaacgtcacctctatgttaatggctcataagcaaatatttttgagacatttttctccaagttccacactcactgcccttaacaactccacttagctatctcaaagcacctcaaaactcacattcaaaatggagcttctcatttgctacaatgaacactctctggcttcttgtacaaaacaaaacctcagcagcttcagccagaagtctggcagccgccctggtctcacccatctcctcccctccaccaccaactccataagatgccagttctcttcagacaggccagccccaccgtccaacaccacactgccatccctcctgcctgccttcttgctgccgcctgctcctctctcacagtgtacatttctctgttttctatctctcccacctcataaagaaaagaatccaagctgctttgtcatgactatgagcatcctgggactagcagagcagactcttttagaacctgttatctaaagacccacagttttttccactgctgtaggtaggatttttcactgcactcataatacacacataattttcttgcctttgggttttagcttatatgtaaatgtgccttttccttcttttactataaatataaagcaaaatgaactgcgttatttcctacaaagagtttttcagtgtctctttaaccaggaagtactccttcttctgaattgctcatagtctatttttcaacctaacagagcatcacattttaattcttttaaatttttattatgcagaggggacatatgtatacctatggctggtaccttttgatgtatggcagaaaccaacacaacattgcaattatcctccaattataataaatgaattttttaaaattgaggcagagaaagaaacatgatttttttctatgtcttattatcaagaccaatctttaaattttctgaagtcagagattatgacatttcacaaaacacaaaaaaatgttaccttgaactcggcagaccctcaatttatgtccatttgggtaaatcaatgaatgaacaaatgtttaatcatttttttggtgagcctatttatcagaggcacacacttaacttttacatattgtcatgtgacctagggaacaaatttttatcctctgaaataaagagctagaacataactaaggatcaatacccaataccagaattcaggatcaaaagggagtcaaattcacagagattaataagataaaatgcaaataaaactaggtttggaactgtatactaaagctaaccataacctctataatttattctaaacattcaacatctagatatactatttacttattcatatttactattatcttgtagcaaatcaaaacaaacacaaaactcagtaacatttatggctagagcactacatttctctttttgccttaactagaaatggatcatttcaatcaattctcacatgaattcatttgaaaaagcaatgcattcaacagatgaatggataaatcaaacgtggtctatacacacagtcttaagatagaaggagaatcgaaatgtgccacaatatgaataatcttcaggacattaggcgaagtgaaataaaacagccacaaaaaaacacaaacactgtattatgagcctacttatgtatgcagccaaattcataaaacagaaagtagaaaggtgtaggttgctgggtgcaggggagggtaacggtttaatagatatacttaaccctactgaacagcacacatcaagagttaagatgtaaatttcatgttatgcgattttttactacaattaaaaaaaaacatcaagcactgattagagaagaaatgtctctaaaggtctttgttttcaactctacttttcttattcacgttgaaaacttaccattggtgggatgacagcagctcgatgctgaagctgaggcaggtccagtgggtttggttttatgggcgatgagaccagtatagacccagcgggatttaacaacgaaggcttcgaatccataggaaacattctgaaaatgcaattaaaaatgactaatcaaaatattcttattcaagactttaaacatacaatcaccataattccctgtaagttaacatgtacacacacacagacatatcacattaaccttacatatttgaatactaaggaaaaagtctacaaagctaaattttcaggtaaagaaacctaatgttaatttataggttgatattcatctgcatctaaccaacagaacaatctgaacaagggccattagagaatgtcaggtcctaatttaccgttaacataggttacaaactagtgttttgctaagatgagagggtattttttaaaacatctgaataaaccaccatcattttaaaatcaagaatttcacccagggactcctctggtggtccagtgataaagagtccgtctgtcaatgcaggggacatgggttccattcctggtccaggaagacccgacataccacagggcaactaagcccacaagcaccacaactaccaaagcctgagcctagagcctgagctccacaacaggagaagccacctcattgagaagcccatggactgcaacacagagcaggccccactcaccacaactagagaaaacaagcctgcacacagcaacaaagacccagcaatgccaaaaataaagaaataaaacaacaaaaatatttcacccataattccagcctcctggtttctcatgaaaactggggagaaacggcaccacagaggcagcactcccacgaggcaacagtaggttgagctcacatggctgcccgtgctccccacccagtccgtgctccccattcaccctctgccacctctcactgcaccacttcacttagtttcaggacccacgcttgagtaaaggatgtccagaatagtaactggaacattataccttacaggcaccatcatatttcccagtgttgtcagttactgggagaggtgaacatttgaaaaggtataaatgtgtaggaaaacgagaatgtgtaaaagaaaacaaatttttaccaaagaatcaagataatattaaagatacaaacaacagaaagtgtcattttgccagcttggaagcgaagtgaactagaggatcgtccagagagtgttaccatgtgttgataaggaacgtcagaatttcatgaccactatcacagtcagccctcaggtgctcctcccctttatgattactgccatcctaattttcccttcactcataaatttataaataagtcactaaagccaacagcacagaacacataactcttattttagatgacatatttcagtaaagcatgcttaaaaagggaccatacagcttgaacccatttatgtttaaagtttggaacagttaaaatccacagtattgagacatgagaaaaagaatgctagaaccttcaattttctgaaaaaccatggttaagtaggagccctatattatttctgtttttgctgattaaaattctgttatctaccacataaaaatctccttggagaaattatgattgttatgttcaatatcattctagtattaagtcccatgctttagtatataagatgtacaatatactggaaatggaccaaaaacacagtgacaccagaacacactacagaagcagagctctgagcagaatctggctgtctcctgagagcctctttcttattaaaaagggggaaaatagaaaaaaagagctgagttgggtttctggtcaaatgacattttagtctaattcattctacagtctgcaccaatcaattcaacatggaacaaatgattctaggtactgtgattttaggtgactgcatttctttcaaggaaaagtaaacacccaagaaactgagtatactaaagaaggtagtatctactcctataaaaatttattttaacagcaattgttataaaaaccataaagattatatatctgtaatattaatttgactaaaagtactaatctgtatcatgcctgtactttaaattacaaatatgaatcatctacagttttaactgatacaaaaaggtgaccattacaatcacctctaacttcaatcagattatgctttctaacacacttttcctccagtccccatcttcgccctcagcatctctcacatctcacacgcgggcactgaggccttgctccgaggccattccatccgagggcagagctggggccccctggcccctgcctgccccttcaccaccacgtcacatggctcggccaccatagcagcaggcaactgcggttctggtcacagctctgggagctgaccgcccttctctgctattatatgggatgtacctaacaattgatatggaaagaaattaaagtctttttctttaaaaaataacgaccacacagttctttttggttaatcaggtgaccagcatcagaacccaacagtaaaagcttggttaatcaggtgaccagcatcagaagccaagagtaaaagcagacagactctctcactggccagtatttacacaggagcaaccttggcagccagcaccaccccgggttcagtctgcaaccagcagaataaagacgggggaggtcaaggagggagcctcaccgctgcctctcgggctccccgtccacgtcctcgtccgcactgcaagtggcgctggaatcgtggtcggacaggggctcaggcctcggggcactcagctgttgggccacccctagatcgtcttctccaggctccggcttctcgccactcctctgcaggtctctgtctttggggtccccttcaactctggatggactgctttctggaacccgcatttcaacatccacagcatcggccttggcagccgaggggaggtcaagagcagaagtgccttcagccccacgctcctcatgctccacctccatcggctcggccgtgtccactgtgatgctatcgttcgctggggcttccacactgtcatcctcggccacttttgtgctcgcagctgccggcgagggagaaggcctgggcacggtgtcaggggtggcctccagctcggccgcggcctcagcagtccctcgagtaggcgcattttcagtgctgtcttcgccaggcttgacagcttcaactggtgaaggagaaggagcactttctgtatcagaactattttcagcaccttaaagataatgatacagcataaaaatctgataatgaacatgtgtcaggtggtgacagaagccatgcttgaaagtacttgtttaggatgggttatcctcctgtgatgacctccctgaagtgccacagcactgggaaaacaagttttctaaaaagtacaaaagggaaagctcaaattacctcagtctttggaaacagaaagcataaaagcttttaatgtccaaaaataattcatgcaaaatttgaaaaagatagattaaaaaataaaactaaatcaaaaacatttccataaaagatgatattctgatttatttctaccagtcctgtctctgtgctttttttaacccaggagagctgacattagaacagcaccatccaaagaggaacctaatgcacattacatctgtaattttcttgtggccacgttaaaaaagtaagaagagagacaggtaaaattaacttcaacaataattttatttaacccaatatgtgcaaaatattgccatcttaaatataaccaacatagaaacccagtaacaaggtgttctaccttttttagtactgtcttcaaaatttgctgtttcacattttggcccatctcaacttggtcgacagctgtcccttggtgtctgggggctactgattccaggaaaacccccacaccccaccacagacaccaaactccacagatgctcaagtcccttatataacagggcgtagtgcttgcatacaacctctgcacatcctccagtactctccacatcatctcgagatgacttaggacacctaagaaaacttctgtctgaagagctgtacaaacaatgctaatgctgtgtaaatagttgccatggtgtggaattctgctttggggcaccttctgagttttttggtttgttttttttttaatattttggacccacagctggttaaaaccgcatatgcgggatcctcaggtggagggaagattgcaatcacattttaagaactcaacaaccacaggggtgtccagtggctacctcactggacagcaaagctctaggacaatattacataggttctgtcatttaattttttgtaatgctggtctttgccaccatttgttccatctcatacatgtacctttaatgcttttacctagatataacaaaggaattacaaattctctatgtcttactctggactggtattcaactctccaagtctcaaatcaaactcttttttagagtttagtatccagcgaacaaactaggaacccaggagtcatcttccacacgctcctctcatttatttccagattctgcaccttgatgagtcatacatttctctctaaaaatatacctcaagtccagccacttctgttcaatttcacaactgccatttgactccagaaatgacaccaccaccccagactcctctctaccacaaagccagagtgaatttaaaagctaaatcttaccaaaactcactcccactctctccacttaaaacatctccaggagtcttgctgctcccaggatccagtcccaagctgctgggtgtggccagcttgcgagctgccagctccctctccagccccgccttctctgtggccttctttcagttctgtgaaggtccatgcatcccttaccactgactacacacattctgaatggctttcatctactcttccctttggatagtagatcaactaccacatgctttaaaaaaagccttctatgatttcctcaacaaagctgaactttgctactgatggctcccacagtacatgtactgacagcagctacaattttacttttgttcacaattacgtgactcctggctgttgctcccatgagcctgtgaacaccatacgggcaaggattacacatttcgcttttcatttagtcctagtgaccagcacaaggccgaggtcctggcacagagcaggctcacatacctgatgcggtgtgaaatgaatgagcggctgtgaacatgtctttaagtttatgtcacctttcctctattactggacccttgggctactttcaatgcgacactgctacgaacaggacacagagatactcacttcaacattatgttttcgattattttcttaaaatagattacaagacaacacaaaaatttacatctccctaaaattaatacatataactccaatgagaatccaaaagatgtgtaagatcaatttataatttatgtgaaaaaataagtccctgagaaaattcaagaaaatcagaaaatgttatcagcatgggagagacttactcctcagacatttaaactcactatgaaaccaatgtattacgacacgtttggggctgccccagagacagacaagacagaagagaaggtcaggaacaggtcctgatggatgtgaggaactgatacatgccagagccagtgctttaaatctctgaagcaggataacagctaatgagtacaatttctcagaactggtcctttgtgtggaagaaaaccacaaatgctgccttacataatgcagaaaaagaattccaaaagggataaatcctcttaaaactcttaagaagataatctagtacgaaatacaaataacctcaagagatatggagaaatattttaagcaaaatagggaactctgatgccataaatatatcatttttatattaaaaaaagtaaaaataaaaacttaaatggtcatatgagaacaaatacttctcacacataatatttaataactcaacaaattcatgcttgcattcattcaaatatgtgcctaacacctgccatgtaagaagctgtttgaggtcctggtaactcagccgtgggagaagaaatcctatggtgaaacaggcaatgagcaataaacacttgacacatcagatagtaataaacgcagtgaatatggaactcagctgagagccagtgggtacagaggcatgggagcactcacaagacattgccagaggcccaaaggaagtggggaaacatatgccaggaagaaatgagcacgtggaaaagcccctcacgtggggttgtcagcttgggagctgcaataaggacagtgggcaaaacagagggagcagcgcctcacacctgtcagtgccatcatcagaaagacaagcagtgacaacagttggggaggacgtggaggaaagggggcccttaacgcactgttggtagaagggaaactggtgcagccactatggaaaagagtatggagcttcctcaaaaaattaaaaccaggactaccatatgatccagcaattctatgcctaggtattatctgaagggggaaaaaaaacactaacttgaaaaaatatatgtaccccaacattcactggagcactatttacagcagccaagatacagaagcaacctaagagtctatcaacagatgaaaggattcagaaaatgtggtgtgtgtatacacacacacacatatatgtaaacatataaatatatgtcatttctgacaacacagatggaacttgagggcactgtgctaagtgaagtaagtcagagaaggacactggatgatctcactcacatgtggaatctttataaagaaaacagcaccaatagagagaatagactggtggttgtcagaggcaggaggtgaagagtaggcaaaaggaatgaatgtgtcaaaagactcaaacacctagttataaaataactaaatcctgcggatgtgacatacggcataataactacagttaattacactgtgttgtaaatctgaaagttgccaagagtagacattaaaaattctcatcacaagaaaagtaactatgcaatgacgaaagttaaccagacttactagatgatgaactagactatttcataatgtacaagtactgaatgattatgttgttcacctgaaactagtgtaacattatatgtcaattttctcatttaaccacagtaaaaaagaacagagtgagcagcagaggggcctccagctttgattctgaatgagatgggagaagcatcacaggatatggagcagagagacctgacctgatttgtattttacaaggttcacttgggctgctctctggaggaaaaaaaatataatgcaacaaacagcagcaagcaggccaatccagaggccactgcaaggaagggacagtggctctaagtggggtggcagcgatggaggagaggaggagacctaaggagaggcaccacacacacccagggggagactggagggaaagggaggcgtggaggtgagagacacaggtcagcttcagatgctgttaacccttaggtgcccaaatacaaaggttacacaggcagttagatgtgtgagcctggactcggataacagctcaagtctcaacaacaaaaacaaaatcaaaagacaaaagctcagaagagcatctcacgtgttgtaaggtctaatgggcagcagcaattatggttggtgaaagatgctaccagtgttgaaaggcagacaaaaagccagactatatcatcctcattttcggagaggacaatggcaccccactccagtactcttgcctggagaatcccatggacggaggagcctggtggcctgcagtctatggggtcgcgaagagtcggacacaactgagcaacttcacattcaatttcactttcatgcattggagagggaaatggcaacacactttcgtattcttgcctggagaatcccagggacaatggagcctggtgggctgccgtctatggggtcgcacagagtcagacgcgaccgaagcgacttagcagtggcagcagcagcatcatttttattcacacagtgatggaagccaagttcgagggcaaactaacaagtcatttctcctccaaagcctggaggacatgtcagtgattatgcagatgacatcatctgacataagcactacttcagttatcttctttcaagtcacagcgctttaccaagcaccagccaagtgtgagtgtctttttcttcccccccttagaacacctcaaagaatgattcagaccaagagaaaatctaaattatgacaaaggtttggtccttctgatgtaagtcatctaattacaaaagatactcatatggtcaggcgtctatttaggaagctgacacgaagacttggtctctagcagctatctccactcacccatgtgcaagagcctgagggcacaaacccatgtggcttcaggatctccagttaagactgaccagggttcatggaaaatgcactgtgcttgctgctcttctctgacaagtgaaattaagtcaattctggcggcaagttcatttcctactaataggaaaccattctagatgtcaccattccaaggatctccctcatagctcagttggtaaagaatctgcatgggttcaattcctgggttgggaagacgacctggagaaggaaatggcaacccactccagtattctcacctggagaatcccatggacagatgagcctggcgggctacagtccactgggtcgcaagagttacacgtgacttagcgactaaaccagcaccaccagatgtcacaacacacacacaagtacaaatggcatgatgtgaccaggccagtccacactagagcccacggaagcatcgctgtaataccaggttgtaatcaacctgaccacctcatttgacagtttggaaaagcttcacacgaagacaaacaggaagaaaagagaaggaaaaagtcatttcgtggtgttcagtttttaagagtatgtcagcccatgcaacaggactccacgttctgaaataaacatacatatgacaaatagacttggcccttgttatgcaccgaactgtgtcccaccccacccccaaatttatgttaaagccctaaccctcaatgtgactgtatttggaaataatgcccttaaaaggagataataaaggttagatgaggtcataaaaattgggccctaatttaaagggcttccctggtgcctcaaatggtaaagaatctgcctataatgcagaagagaccaggttcaatccctgggtggggaagatcccctggacaaagaaatggcaactcactccagtattcttgcctggagaatcccatggacagagacgccttctgggctaaagttcctggggtcacagagtcagacacgactgagtgactaagcactaatacaatagataagtttctattgtttaagccgctcagtcttatgaaatacaagtttcatgtacatttataacccaggcaatactggctaccagttacaaccctgttgaagtcagcaaaccctgaggacctctttccaaatgccagccaccccttcaggctgcttgcagctcctcagcttgccccaggcaagcctgctccagtggtctctccattttggcaataccacctcggttttcacaaaacctcacataataaagttcacttattgctcaaagtcaaaacccatttcaagataaattttaagtttaaaacccaatgacaacaatttgtagaaaaaccaaaatctagtatttctaaaactcctggaaggtgtagaaccttttaaactgaaaatgtaagcacctacaaaggaaaatgtaaacagatctaattacctgcaaagctttaattctggtaatttaaagataaaaagcaaatgagatagagaaaatatttgcatacataaaacatgaatacatttaagatataacatattaaaagctattggaatcattgtgaaaatccccacttgagaagaggacagttaaaagaaattcacagaaactgtaatagtaatgtaaactaaagtaaattaggtaccttttttaatttgaaaaaaatcaagaaaacatttactttttgaggaagttgttactaatttttcaaatagcataaaggattttacttaagtttcttgacatttttttggccaatgcctctgggccattaatacattttttttcatgaaaacatcaacatgacatgttcagctttataaatgctgaaataaatcaagctcaataaaataaagaaagaggaaaatgaaactgaaggtagtgacggaaccaacaagtgtggcaatgacagagacacactgacagcttatggacgtcagcactcagtgtctcagggaggactgccacccttcaaaacctttccaattgcagcacctggaccatctcaggagctacataaatacatgtgtgattgaatgataaatacactgtgttctcgtttcctgaatgaagcaatccctagacacccaaacaactaaggcacccatcacgcatgtgggccagcagacgccacaaccagacggaagagtggtggtaccttcactgtcctcggggttctcctcttcgttagaggcttcaatgtcctcgtcctcctgtgctgagacagtggaggccacgctttcacactgagacacgtctcgctcttcacggggcttccgtgaggcctagaagagtaaaaagactgttacttgggatttacataactgaaaggaaagaagcaagccttctcacagctgaggtgaggcagaatgcatacactagaccagcagctgcctgtccgacaagcaccctggcttgggggcagggagtcccctcagggaccactaacaggccttgtgtgcagatggatcgcttttatcaaaatgatcaaaagtcacaaccaaaccatttctggaactacttatcacactacatggacaaacagccaaagcctgaaagactcctgttcttctctccctccaaaaaatgttatttttctaataaaaataaaaattgctcataatgctagcagctagagagtctcatcagaaaaatctttgagtagtgtgaagatgttaagctcatggtgagagagacacattttccaaaattttaatttttgcctaaaagctggaaatttaaaaatggcaaccaatattaatggatgttttctttcaagacaggctcattcattttcaagaaaatgtctgcaaacttttcaggtctgaaaagagtagtttttctgtcattcttaattaaaattgacattgcatgacaaaggtgaggtttgtttagcctggagctcaaacaacccaagtgtgcctttcattgagtagctaccctggcccaagacagtgcagagggctctctgccctgcccatcatcatacagacatgtgtgcaagactcaaggtttaccaaagccagttttatttgcttcaccaagggcactaagtgaaactgctgttttacaaaaacaaagctgcaactgcctggagatgaagagtgcactgagcttggcggtgccaccagagtccacactaaggtaccagcactctcactcacagcttctctgaccccatggatgcaaatgtccacatagtgggaaagggaacatcttaatattcttaggaaaacaaaatattcatggagccctcaaagggctctgtagactctgagaacactggaacttccttgttaacacattttcaataatctctaataatgtttaaataattttttccgtaacacttcaaaacttgctggtttttagtctttatcccatggagtctctgagaaaacgtcttttttcataagccagatcaactcattcaatatggtcaatagaactctaaagttttcaattcaaactccaaaatgcgtatatttttcaaatccagtttacagtaattcaaaagcactgcactgccattactactaacagaaattttactctttgggtaataaacagagtcaacttgtgccaagaaactagcatatcctttataggtaaggctacaaaaaagttttcttcaaaaccaatctttgaagcgcaaaaaacccccccaaaaaacagtaagtaaaagattcaccacctctgatacactcactttctgtttatgctgctgcaaaaggttgtcaagattgtgcctccgtttatagttaaaatagaagtttttacattgggcttcacttttagttcccaccatcttggcaattgctgcccagttacgaccatgttccactagacctgtattttaaaaacaaaccaaacattaactgaatagtcacctgatacagcaagcaagaaaaataatacagtacccctaatccttgcactcaccatcattaacactgtgttttcagttatttattgatacatttcaatgcttattgaaatgtgattgacacaaactcattaacagctctatttttctatccaaagctcaaacatgctcaatattggaagaacgtgaccctgtccttgctgtgttatctcccagaggaccaggacaatgcagacacacagggagagcccagatactgtcaactgcgtggttaggtacttctagatcctggggaacactgtatcagcacaaagttaataagacagtcaaatgtgagtaattaacaccaagtaaagacacacttgaggctccaggtataatcaacatgtccccagtccatatgcaatcaaggatcccctcaaaaatatcaaccaggttttcttaaaccttctataatacaatgcatcacaggaacctatgcaatctgacttccttccaacaaatgacacatatatatggcacacagaaacatatgttcatgaaatatgggcatataaacgcataaacacagagatgtacattagacataggtatatccaaacaggaatttctagtgcaaattcaacaattagtgaggaaaacatcaacttttcaaggttaacaccagtagattccttcacaatgaaaactgaagatcacctccagattctgccagcgtatgacaaaagctgaaaggaaggggcatgagcagttgggtgtggggatgtgcctctgaccagaccaccctgtggccacatgggcatccatttactgcgctgtgacagtcagatgacagcaatgcatatacaaccgtcacagcaaacacacctcaaataaaaatattctgaggacagaacactctaaactgctgtattttaggcaaagtttacatgattcttaaatatgttactcattaccagctaaatagaaaataaatctgaaatgtgtcactaaaaggtcaagctatttgcaataatttctctttggaactgcaaggtaaatccttaaccctcaaaagaattggctaaattttctcaaaataattttacttaaaaagtaatttatttaaaaaccaattatttagccttttagaaattttagctaatttcaaactgtatgacctgtactttatacaggtcatttataagcaagaagagaagaacacaagacccatagtgttccagagtaaaatgaaggccatgtgctacacaagtgtcagaggcagaactccttcatctgtctggctgcaaagtccatgctctcatctctgaatcacagcacaatttcttaacagttagtaatcaaacttagccttactaactgcaaacggaggaaacagttatcattctattaaatgcaacttttaaataagagactttttatatcaaataccttctaaaacaacattaattgcatttaatcacaactcttctgtaaaactgaaagtagcttacatgctctctaacaagacattcaaaataaaatgagagagaatgttaaatccctcaaaagtgggtccctcaaacaagacacactggggtaccttacagagcaggataccgtcaaaaagaccttctaagtgtacttctaaattctgcttccattgtggaagaactttttttaattaaaaataaattagttctgtgtcactcattactaataaccctaaaaacaaacaaaaacaaacccgaagaacctgaactactatcatttaccttttttagcaacttccatttcttcttctgtccatcgagaggtttctacaggttccgtagaaactgaaacaaaggtagaactcagtaagtcagagaaaaatcatccatagattatacagcaccaagctgtaatctgttaactccaaacacacctccaaactctcaccagttatctttctaaagcatcaatctaattgcaacactcatctatttaaagatctttgttttgtaagcaaagcaggatatagtcaaaacaaagcccaccatgatctgcctccatccgcctgtctaaattatttccttcattttatccttgtcattcccagaacttgtactttcttcatatcaatacttcatgtaatgataaacttggtaccactgagccaccagtgacaggactcgtcattaatatgatccttttataaactaatgaagatagtccctaataagagagaaaaatgcctatgcttagacccagtgtttccttgtctaagaatttattcctatgaaagttaatttaacagaaagaaaatgccatgtgaataaagtttttttcattacagtgccatctaagttagctttaaagggggaagagatagccaacatctcacagctgtcaaaagtgaaaataaagatcactcagaaactagaaaacattcataacaagtgcccagttaaaacctcagaaaacaaggtggcacacacagtaggattacaactaagtacaaaggaaacacacggtcttagggtagtgaggtcagggctggtgctctttttcagaagactttgatattacagtctaacaaatgtaaaagccagagtttcagatcgggatttctaggctgcccatatcagatgtccctcctgctgcaccccagcactgaaacagaaccccaaacaaaactgtggcccatttgctccagccctgtccactcactgggctctggcggtggtggcagaggtggcgggggctcctcagtggccgcggccgcagcagcactggctgccgcagcctcactggtcatggacctggtgatccggcccttccgacggccctggctattggcagtcttccggccccggggtgtggcctgctctctctcctcagtttcttctgctgtcccctctgtcttatccttttccttggtattttctctagaaacagtggccaaagaacattttgtgtgatttaaaagtatacatacaccaaaaagattaaagctttgaaaattcttcaaacagaaatggaactgccccccaacccccaaactctcagttacctggaataaccacttgggcttttcatcaacacaaactcaatccacccaaagacatgcccaccctccctccctgcttcctgctccctcggccccaaatacctgttgttgacagaaccagcacgctcaccatcacccagtttacagacctgaccacgcctgcagctctgtcccgtactcgtcactccccgtcagtgaaccttccatctcactaacatttctcccaccacctgtgtttctatcaccactgcccatgtccagagccccagcagcccagccgcagcctttcacgcctgcttgtttgtctcccacctctccgttcatcctaaactgctcccagagccacattctagtggaagagctgtggcaggaaaccatttcagccatgctaagcctacctattcccaaacagagccacaccactccctgagtgaagtccacatttgagatttctttaaggctttacatatcgaaccccaacctcctcctgcttttctgctgaggcgtctgatgtcccagtctaatgaaactactgtctgccatttcccaaggaggcctgtccatccacgctacaccctctattgtacccacactgaccactagctcctgcatgaagtcctctagactatgcaggtggaagaaaatctcaagctcttctcagtctcccagcttctgcacatgccttccaggccattttcttttcctcccacttcgatcttgcctaattcccctcctggcctataaactgcctgagaagagcacacgtcatataggtctctacaccgtccagaagactgagctctcagaagcagtgtatgagcactcattaaacaaaccaggaattttaagaacaaagtcaaaacgagatgtggcagtaacttatgagcacttatgagtacttataaccacttgaccatgtggtgaggacaaatgttttatctgaataagtaaaaaaaaaaaaaaaacctataggtttcatcttcctaaagtacaaaattagaatggcatgagtatccaacactttaaaaaccatgacaaatgatttaggctgctttaactgcctcaaaatcagacaaaccttcagtatttccaagaagattagagaaataacaaaataaatattaaaaagaaatgaacaactacacaagcaacaactactgtgtattatttagtccatcccttctgaaacatactaggtcatatctggcaagtccatcaatccaaaagttatacttactagaatattccaccccttaattatgtcaaataactactaggtgacaaagcacatatcccattgatttttctaaaatctaagattttataccttcaatagattcaatctcattattttcaaataacaataatatttaactaactcacttagagtcctccttttcatctttttcttcttcctctttcttttcctcctcttttttttctgttttttctgctttatcctcttccttttcttctactttttcttcttgtgatggtcgggcaatttgctgctagaatgaaccatcatttgtaaagttggaaagttaaaagaaatagctcctcaaattgtaatgataataaatatctatgcaacaaattaaacttattaattaatcctccacaatgtaactaggggttatgtattaaaaatcagctgaaagctctttaatacagtctgtatgtattgcttacaagggtacacacacacaaacgctccttgtgtttggatccagagaggtaacaatgttaggattccacttagaaatctgatgttgatactctaattccaacatctaatctgtcacttaaacatttcaattctgctgtgaaatttgataaactataatttatcaaaccattgcccctagtattcagttcagttcagttcagttcagtcgctcagtcgtgtccgactctttgcgaccccatgaatcgcagcacgacaggcctccctgtgcatcaccatctcccggagttcactcagactcatgtccattgagtcagtgatgccttccacccatctcatcctctgtcgtccctttctcctactgcccccaatccctcccagcatcagagtcttttccaatgagtcaactcttctcatgaggtggccaaagtactggagtttcagcttcagcatcattccttccaaagaaatcccagggttgatctcattcagaatggactggttggatctccttgcagtccaagggactctcaagggtcttctccaacaccacagttcaaaagcatcaattcttcagcgctcagccttcttcacaatccaactctcacatccatacatgaccacaggaaaaaccatagccttgactagacagagatatttaatatgttgccaattttttcatcattatggataatactacaagaaacctctttatgttgtttgtctttgggggaaacattctttaccagaatagtagacagtcatggtcattatcaagaatgaagcaatttagaaaaatactatggatacaacaaagtgaaaagtaaacactcaaatttatctaagctataattacaactaagtgactgtaaataagcatataacaaagactaggagagataagatatggacccttatatctctgatgtctcgactactagaactgttactctgagagaaaagtaaaattaagttttgtgttgagttctattacatttgtttattgaagaaatccaacggcctaactaaacaggaccatcccaggcatagtacctctttccagtctctgccccttcccacagggtctgtgctcaggctaccctcagcacacccaacattttcatgcctttgcccagaacaaagcaaaattttccttaatttttgatggaatctcaaagtcttttactgactccccaaaactaccattagctttttccttaagataatttctcttcagtcttctccagaaaatgtcctacactatgtcttcttctaaaccagatggaaagaagaatcagaacccgtcttcttcccgactgccccttctagaacactgttcaaccatggtgtttaaaatctttttacaaatttcacacagtctacctatgacacctttcttcatcatttagtgttaaggactgactctcaaagtcgcccaggaacccagagatgactttatcacatggctcattaggccttgtcattattcttcagattcaagatgctagtcactgccttttctatcaacatgatatcctgcgtgtgaaatactttcaggtcatgcccatcaaaacctcccacagggcatcaccaccaccatcttcagtgggcatgcgtcacctccaggaccctgtgatctactcacacgccgcccccaccgcatcctacctttccactgttgccaatcctgctttctgtcctcatgatcttgattctatgaaatttccacaattcatcaagaatggaatccactttcactctggccctttggttagactgtttcactatcacaactccctgctggccttatctgaccttcacagcttcacacccttctaactgcaagtttcattttcttttgagtatgcattatcaccttagagaaaactaagaaatcgggaagattttcattttttgttgttgttgttgttgttactacacattcacattctttcaatcactcttttttttttctttttttttatgttttgtttttttttttgtttatttatttatttatttttaatttttactttacaattctgtattggttttggcatagattgacatgaatccaccacaggtgtacaaaaaatcgggaagattttcaaatgcatactctccaattgtgactagttctactttacagctgggaatgtttcattcaccccaactcatgagtacgccacagtggtcacaagacctgtttcaaatgctagtaaccttaccctgcaccccacaaaggtagcattcatctgtcatctgaaccaacaagatggcacaccaatgacaaagtcagccgtctgcctagcaagtgggctgcataacccagaaacagtttacagccccgagaagtcatggggaggtgtcaactcagctgaagacagggaaagaggtccactgtcctcaggtttgaacaacacatgtaactgtattgccccaatactattctgcccctaataccaaccagggtcttcaggtaagcaaacacccccacatgccctgctgcctgaaaccagcccacagcagaaccttacaagcaaggggacatctgtgctctgcacacaccacccaccaatgcccctcactaggatctcagtcctggcccctcaccccagttgcagcttccccaacctccagcagcctttacacagctgactcctcaaatgctctatacttttcttgaccaaaaaacactgcttctgaagtctgtgagaccacatcccaagaggtggcattgctctggaggaaacaatgacccagaacacacaagatacttctgaccacacatcatgagggaacttgtatctggagatcagcgtgaccagggaaggcaggcgggggctgtggagaacaaagcacttcagagcactcatgacggcagtagccgttgtgtccacaggtgccactgtcctatgagtggtctcagggcatgtggcacacagaggagcaggagggagctgtggaggcagctgaccagctattcgaaggaaaagagcttctaaagttctgaactgccactgtgaaaacacacactgcactacattagacacaatcttctgacatcaagtgcttcaaccccagaattgaagctaacctgaaacaatcatgttccaagtattttagcaaacaacccttgactctgtagtcaccttactctacctgtccccttcacagaccaaaggactggaaagggtggtgtattcattaagatatcacagtgcttgtatttaattatattacaattgttaactctgacatgcacaatttcaatagcatgaaaatataaagcttctcattaattttggtatgccagaaacttaaaatgcattcaaaatagaaaatgcaacacattaaatatagataaacttcaaaataatcaaagcatgttcctaacattctaattaatttgatagaaaggtcaattcctaaagtataattacagaggaagcccctattataaaatttttcatctttatattccaccaaccttgatatagtttccatacaataatgaaacatacctggtttctccctctgcgttttccgtagttccttcttactagggctttataattctcatttttcttggttaagtagtaatataaaacacaatcgggaacactctataaaaaaaattgaggatccaatgagattgaattttttaaaaaatcaggtaacatcttcaaggaaaatctctagtgttctcaaaatataaactggagaaacacaaatggctaagtctttaaggcatatctaggctgtaaaatatacatatatatatagtatctactgttttgatcaacaattacagcggtcttaacacagattatgtaaaagataccaggaactatcagaagcattcaagcactttcctattaaccagtaactaagttctctttcttcctctatataagtaaatattcaaaatgtctctttaaatattttgttcataaacccaacatccaataatacattgtggaacaaattcagggaaaatcagagctctgaaattttaattagaagtttaatgatgttcagaaaaacactgtaacctgtgtgttttcagggaaacatagtatcaggtcattttcattaaccatgaaaattagtctgtgttgtaaatcatcatatgattgtaaacaccactatattattcacataagaatcttttctgtgtcgagccctttgcaaaaactcaaactgcttctgtgctttagcacacaaaaccttcaaagcagcaaccaacccaaatctatcaataatctcagtgtaaaccatttcctaccttcctttccaagtaagatgcaatcagtccaaagttttttggatgctggataaacctgagtaaaagaaaaacaacacacacacacacacatacttactttaacaacttaaaaagaggtgggggaagcccttgggaatacaaatataatgtagactaattcctagtgactcctaaaggccaatgtcctcttaaagggcacagattcctggaaacagtccaccaggaactgactggattgggatacagtattgcacagatatctgtaactttcaaatgcacccctagtgattctgacaccgctcaggtttgggtaccactcttaaaacgcctccacaactctgttctaagctggtacctacatttccagctataaatttacaggaaggttgcatcctatctgtcttctctgcctcccacgttattcagatgccaaaatggggccatgttttgggggaaacagttcaatttacaagtaaatgccaatgcttttcactaactcatataagcttctattagagaataatttaaaatttaaattacttgtctttaaagatctccttctcatggtcagtccaaacattcatgaactgcctatctttataaaccttcatagggtcctccatgagcccattcatgttaatgaacttgacccgtctctgttcagcatcaaacatcataggtgggatcacagagagctgtcgcatttgtttctcattattctgaaggaaaacaaagaagaaatgcaatgtacatagaattaaagagggccacagactgactatcttaacagacactgaaacaccacatatgcactttaatgacaacggcaatggtaccataacatctaacatatgatcattatatacggatctaataaatactcattgtacgaataacagaggcagagaggcagaaagtacatgtactttttaaatccaccactacaatgtgagaagagttctttccttaaacgcagcagatacttcagctaatggatctcagacctaaaggacacacaatgatgtcagatcactgaagtaatgaccttatgaagcacttattaacattaatattgcctcattttaaaaagtctcaacatcattttatagaataataaaatagaaaaatacacagacaggaaccaaaatcttaaggtcactgattttaaattaactaaacttactgaagtatcaaacacttcttgctaatcttacataatctttccactgcaaatttaagactatcattcttcaaatttcaactaaaacttggtttcagttatataatttatattcccaaagcttaagtcagtaagtttataagcacaaacttcagtgagaaaacctgtaccaaaaattgtaactactgaccccaacacaaggctaggtcttcttctaaaactcttctcctagcagtagacactgccttagtcaactcctgacagtttctcactttacagggactctcaagtggtaaagaacccgtctgtcaatgcaggagacataagggacacgggtttgatacctgggtcaggaagatcccctggagcagaaaatggcaacccactccaatattcttgctggagaattccatggacagaggactctggagggctacagttcatggggtcgcaaagagtcggacacaactggagtgacttagcacagtctacctcagtctgtctaaacaccaaaatgtggtttgggacagacacactagcttgacatccaccttgacattgactagcttcacattcagctagtattcacctaatactagctttggttgcttacagatgccccccttatagaatcagatcaaacagtaagtaaagaaattaaattagtcatcactgcagagatcacagccacaaagcctgaaatgtacagcaatataattgtctttgattgttacttaagagggccacaccttcagaactgagagatgaggttttaaaaccaaaactagcagaagttaatatatggcttttggaccaaacttcagagaatatgaacccagctatgaagactcagtgctagaaactgaaatttattcttattcagaactgatttattatcatcatattgatctctcccaggctcagctggctagagatcacactctagacatcaccccccactccacctccaatgaacctcaggtccacaacctaacacacaaacatctgctcctttgctctttcaggaaaacggcagcagcagcccatcctctaacctgctcgtcttttcccccaactcctgtcctatccattctgccttctactaatctttcccactaataaggcccctcttaacacatttctaccactgtcgccctgattcaggcccttatttttaatcataacagcgtcctcacctctttccaagcctccctgctgccgaagccatcttcataaaacggcaataagatctcagggcagccttgtttataaaccttctatggttggccatgtactttggaaaaacccaaacgttgtaagcattctctcatatatatacacaaataaacccttagttcatggggtatgaagctaaaatgcctactcaattaacatgaattaattaaattaagtgtcttacctcctgttcagagagcccatcaataatttcagaaatctcatgttcactcctagcaatggtggctgaaagaccagctcccctctgcccaactctaaatatgagggagaaattacatatatatttaaaggccttttataaagaagttatcaattagattacttttacatcaatttgctttctgagtgggactagaagtcagggggaaaaaaccctaaaatgctattgagtaactacttttaagcaatatgtttaagtcatttatctataaaattagtaacaatttaaatgctaagatttctttttaaaggttacaagtctaaattcaaatggcagaactatttgcaggaaacatctggaaaactagttattggtgtcattttcatttcaaatagcagtcttttgtctgccttccacagcataggatagcagacttagaaaaatacataaaacatttttaaagggaggggaacaaaaatccaatcatcactcctcacaacaacttaactgtggttaccagggctttcatgactcacttacatgagacagcagaaaaggcaactaaagattctacctttgcaaaagcacttgtcctctaaagtaaaaacaaatcggaaactatgtaccaataacaaagaatttcttaattagcaaacaatttaataagacttttgattatgctgaaaggtagtgaaggaccatgaaacattgtcttattcttactatcatttcaaaaggaatgagcattttcaagaactgaagagttaatttcaacatatttacttaaatttagattcaacagcatgattaaatataaaaagttattagattcaccaagatataaacattgctaattgataacaaagttttatattcaaaataaaagttcttagactcatagaggtagagaagagatttgtgtttgccaaggggcaggggagggatagattgggagtgtgggattagcagatgcaaactactatatataggatggataagcaacaaggtcccactgtatagcatagggaactatattcaatatcctgggataaatcataatggaaaagaatatttaaaaaagaaggtatgtatgtgtaaaattgagtcactctgctatacagcagagactgttacaacactataaatcaactatatttattttaaaaaagaaaaaatataactaaattctttatgaaccttcttaatggttagattcaggtgacaataaatattgtgaaagattaaaaatatgattcaaagaaaaacatcaaaccacttaccgctgaaaccgttcttgctgttctctctgttttcgaatctctggaaattgcttttcatagtactctcttgttttgctttctttagctttcctccgagggttattttctattctgtccacttttttctcccatgcctccatgagctgatcataacgttggcagattttttgttcctattaaatacccgtagcaaattaataattaaactaaactctgtgattctgacaaacctaatacttaaaagcacaggttacttcttaaggctaagtcagaaggacatttggcctatgactcaactgggaatgaaaaggtgtccttgatctgaaagaagagaaagacagggagctgttttctatgaaaaatccatatacagagcctatcattgctggatttcttagtcaacattaagactacacaaatcaacaaagtacatgctgagccactctgataacaattaagtcttcattgtcaaaaaaatggaaaatgagaaatagaaacatgtaaacagtttgtaatcccaaaggcaagcagattaacattttgttgtcacctttccatcggtcaaagaaaacacatttagaccaccctcctactgctggaagttctggttacctgcaattttttcttactataaataatgccatataatgaacatttttacagtctggaaaaggcagaaattgattgtactctatgacaaaaagaaatccagtaaactacatgaaattgagaatgaatgcttttagagaaatgaataatgtgtgacctcattctttaaacagagaagaaagaaccctgtactgtgggcacaggaccattggtgcaaaacaacagaaagtgtgaaagggctcatgatggcccaggaggggaagagagggaaagcgctgtcctccatagtccctctgtctccttgacacccgtccacctcctgggcctgaatctacctttatttggctccaccaccaagtcaccccctcgcctccttcctacacaactcccgtgcaccctgaggtgtaactagatgcacattcccttcctcagcttaaacatttcacagatgacctcagcatctgacctcaagccccctcctgaccctcaggccatgcacaacctggcttggctcccctgccctgtcacgctccctccgcttcccagcccttcccgagcttgtacaagttggcagacggctggttttcctgtgaaacacccctcaggaccactatgtgccagctgtcccctatgtgctctcagttatctggacgtcctgaaccaccggacgaccacaatacagtaatcgcccgtggcctcatctgtcctgttcctccttagactccccaagggctaaagccacatggctatctactccctttgtagaataatacatgggttcaccttcaattattacattcaattataaggcaaatattacttttcagttataactaaacagttactgattctccttacgaatcctgatgagataaaacaccttggttcactcttggaaaaggagaaactgccaataagtatttactaaacaagtcagcgaacatacaaagttcataactaaatactcggtgaagtataagaacaaagtctggacctctatgtttgtctctttggatagcaaatttagcaattaccacaattaaaacaaaattactggatagaaaaaaaacactttagctagtttatttgtatgtgtatgctcttggccaaaaaaaaaaaaaaaattcaagactgataatttaagaaagtatctgaaggcccagactgccaaattagaacattaggagttatagaccaaataaaagctggtgacccttacaattcatcaaacaaacaggtccttaaataccaggtacaagttcatttctgatgtgaatcaaaatatatcatttattaagaaaccattcaaatgaattaacagtctaaaattattacgaacacactataaaagaacagtggcatcatattttctgtaacttaatttccatgaagattataaccacaaaatttttagactgcaagtcataataaatacaaagaataccgtgaatttgaaaaagctgaactttagctgacccagtttctaataagaaagaacagtgatgcctcatcagcatgaccataacttacccaatttgtctgaggttaagagactaaatcagatcatcctacttctctttcatattttaaactactcaccattttctttattttggctagatgaaaatgctatacacagatgaccgagaaaatttggtaatgatattaaatgtgatttatgatatcaaaatgttactagactcagattgatgtgtaagtcacatttatagttacaaatcagcacctgctctcaagtgtggtcaagaaccattctcactaacaatgggaaagcgaatgcctgaagaagcacggacgggaaagctgaacaaatttcagtgaacaaggataggacctcaccctttgttttcttgcatgatttcttcttttaaaaaataaaatgagttttttcctcatcacctggtttctagaagagaaaaatacggttgtatgacattaagaaaaagtacaatttaatagtgcattcactttgttttcagagacactgaaaaacaagcaaagatcacttaagaatatacaatataatcaaagttaatcctaattttttcaccctgcaaaacaagactcctccaataattaggactaaatttcctcccattctatagaaaggctttaacacaaagagttcattttcaactattacattcataaggcaaatattattttcaagttataacagttactgattcttcttaagaatcctagtgaggttaagcaccctggttcactcttgggaggagggaggtggagaggaggccaagctttcgcagttacctcctaacacaggtccacgctgccctgcctcctcagagtgtaccaacacagagagctgactctgccttaaacagaggctttcttcaggcacagaaacaacacagtccactctaagaagtcatgggggcaacgtgacaggacagcaatccctcccttataacttaacagtttcacttttcaaatatgaagtactgtaaccttcaaaaacaatggcatgcaggttcaaatataaatatttataccccacctacttccagaaaggatttcaagctgattattcaaatataaatacaaagccaaggcaagtagaagtaatttttttggttatctgccactctggactaacactgacactggctccacttaaataagcatgaacagtcaggagctggctatatggaaaaggagccaacagattaaagagaattactgaaagaacatttgctatttcatacaaagcaaatgatgatgatgacagaacagctactgaacgatccatacggacacatgtagctgagtagacggtacttcacaagatggtgtgcagtggaagcactgccatgtatgcagtttgctctcgctgtaattatgtgctactcaacagcaaaggacaatcaataaatataatttacaattgttcctaagaatttacatgaagaactccttctcaggacagtgtgctaagcactatagcaggaagatagctaatatgaaataaatcagacagggctgctctgcagcgactatcagggaaaagacagaacacaaacataatggaagctttgtggaaaaaaaattattaaaagtagccaactagatttttatctgctatttgcctttttaaaaatgttagaacagctaaacagttccaaaacaaggtatattttatatgttttgcctaacctagctctaagggttgtcaagaccatagcagcatctcacagaaaaattctaggtatatgacttttattataaaccacttagttaacaaaagttaagatcattcaaatttcagtttctgtcatgcatactaccatgcaaattatatttgccaccagttctgcaaagtagccaactattgcatatactctcagtaagaaaaaatttttttaattatatatatatatatataaatataaatgtgctcattagtaatgtactagtaaataagtataatgttctggttatagttaataaaacataataagaaatatcacatttttgttacaaactaagaataattcatctaaaattctcttaaaatatgataattaaaaaaaaaaaagatacctatctagcttcctctcttacttcaatcagatcaagaaattaggttttcttttcacttattttcttattccaaaatgtgcatccagaaaggcctggtgtctgggaggagcaaggctaagccagctacattgtggagcagtctccgcacccacgtgagggctgagcgcttccgaggcaccagggcatgaaacggcagaagggtctacaaataccgtcattagcaagagtcatggaagggatttccctagaataggatttgaataatgataaaatgatccgtggcacttctactttgcaatggcagatgtggcttggtgggggacggtgtcatcactagtcttaaatgaaaaagcttcattatcttacttcatcatgcgccttgcaggtactccactgaaaaaaagacaaaacaggaggcaaaaaattcaagcctcaaggtaagccatttcaatgttaagtatccaccttttttactagcagatcataaaaccagctagttttatgcaatcatttattttattttttggcctcggaaactcaaagctgttaccccaacccccaaaaagccagaggaagataacatatagtaaaacgacagcaaattacacaaatctaaaacacacctacactacgttatagtactatgtcagcagataacgtaaaaatggtctctttatagaatatacggtctttaactgaagaactccaaagatgataaatacttacgtcttgatgttctcatggtacaccttggtgtctgacggctggttatagagtggctataaaataaaccaaacacttataaacaaaatgttgtacgcttgcctactaagagacaaagacacactccctacacatcaatggaagctcaggtaaagtacggctaatgggtctacacacaaacactcagccacaacctccagacttagctggcctctgtgaataactctgtccaccccatctgctaacaatgaaatccactgtaccccatagtcacttcactcatagattttttttttaactctgaaagacaaaggaggattaaatgccattattaccctaacaagatgattcaaagagttttccatttctgctattacttcttcctccttctacctcagtgatttaacagctgcttgggcaaaaacatgatcaggaaaatgcctctgcaaaggtcccaagtttgtgtacgttattttaagcttatcacccttactgcccagccacattactttcatcctgaacaagcgaccatactccaccttatcccaagaaaaactgcttcagaaagagcactagacacgaaaaaaattttttactcaccagttcaacttttggaccaagaccttcaaatattttatgagcttcttccgcttttttctacagataaaaatattattatattatataagtaagaattactttacctaaatgcaaaattacttctaattcaataatatttacctaaagaccaatctatagtcaaacttatccttacttccaaatattctttcatatgacaggctaaaatactaattttgtttctataactccttcaccaaatcagtcaaatctgaacatgtgttttgaaagcaaaatccaaagaactgctaagttcttaaaagcaaatagatattactaataagattccaaggagaggaagcagagattcactattagaaatgaatccctcaaacatgtttaaatcttcaactcttaatatctctaaagatgatttaaaaacacaaaataccataaagttggcaatctttaccatggtagaacaaactgatctctttaaagaaaagcttataatgagtatattctctagttttaagaaaatcttggtaataacagagaaaacaactagtttgaattactcaaagtattcattagcaaataaatgttgaattatatacttttacatgccttttggggcttccctgatagctcagttggtaaagaatctccctgtcttgcaggagaccccagttagattcccgggtcaggaagatcccctggagaaggaaatggcaacccattccagtgttcttacctggagaatcccatggacagaggagctttgcaggctacagtccatgaggtctcaagagtcagacacaacttagtgactaaaccaccaccagcacatgtctttttcaaaagttaaatcatctagaccaaagtgctatctaacagaaatctacctttaataggcaaatgaaatacaacaaaattcgacactcaagctgtttaagctggaaccctacatccggtaacagtgtcaaggttctcagctctctctgcccagcacatgctcactggtcacgagggttccctgtccactagactcccactgtccacacactgagactgggaattctccaggacttctgatgtgagacgtcgtgggaatgaaatcaagcaggctccccaagtgtaaagaaagatgttcccttaaaataaacattctccttgtcatttatcagtcaatcggtcaaagatttacttagcatatattatgtgaaaagaagtatgtttaaccagtgtagaaagctcaaactagtgtaatgaactttctgaactccaagaaactcaaaatgttattgagatgagaaataaacctatcaaaaatgtcaaatgcaaaactgtaacaacccatacaatgtgcagcgtgaactctatttctattgacagttttaaggcagacttgtgcccttggtaccattaacattttgggccagatgtctctttcttatggggactgcccagtgcattacaggctactcagcagtaccccagcctcaatccattagatgccaccagcactctacccccctacaagttataacaatcaaaaaagcctgcagttgagaacaactgttctcaaaaagccaaatgtacataccagaaaattcaaatttactaactataaggcgtgtattaaataacacacaaataacataatcacaggtcataaatttggaaatatctagcaccttcaatgataatctctctagataatctagataatctgcacttgccagtttttcaatttgccttctcgaggcactctaccactatacagtctacagcctgttcttcaaccaagaacaagctggccaagtggaactgtaaacaagtaatactggtagacaaggaggaaattatgttatggcaaatatatactagtatccacttacctcttcaggactaattttagagctgatatttagaaagtgtttgcatattccaagatttaagttttgcaaaattttattaaatatttgacttaatgttggtttaactgctaagaacagattaacttgtcaattgtttggcagaaatattttaatttaaaaccttcacatttatataactttgttctaaatctgcagatagaagtaattaatgcctcaaacatacactgaatatgttccatgtgccaagcacctgctagaccctaaggaaacaatgaataagaccgactttctggtgtggaggataaggagtcttggaaggctgacagagaaaatgatccgtgctttgggtcctgaagtgattgcactagacagacaagacaagcaagacacagcgacgcctggcactggggcaacatcacagggtaaaaagcactgtcatcaaggggacactcatacctgttctggtagtgctaagaaaggagtccaggcccgcagcctggccaggcaggcatgtgagccctgatgaaaaggctgggctacttgggagaaaggggggaatcagcaaaaagttctctttggaaatcacactggggatctcaaatatgaaggatggattagaaagtaaagaatgaagcaaggaaactcagcacctatgcgaggtgatgggttaaaataagctagtgccaaaggaggaagagagaagcaactgaccagaccaacactcaggaggcaggactgaggctcctcattgattaaccaaatttgcaaagtagcaaaaagagagaaatagacagtttccaagacaatggcctcggtgaccaggggttattggcactgagtacgttctctattgtcaatctctttcttctagtgaaactagtgctacagtaacttgcaaatcattcaaccaaagcataaatggttttgaaaactacactccacacccctctttcaatatatattataacactgaaattagagcactgacaaatatttttgggatctacaactgggaagggtgacagccaattaaactattaaaaatagttgagaagagtctgtttagagactaaatgaatcttggcctcaagtttaactatgatgcagagcactttttctctcagtaagacagttttaaagctaaccatcagcgtgagcagtttcctgcttcccactaacgtcctaaataaatgaaagaagtcacctctcagatcatggccccagtctctcaagacatgttaggcttaactgcaaccagcatgtgttgctgacaaacaagaaggggatgacccttgtcaccaaccactgctctctgccttctgtgtcaaaatgagtaaggtcattcatgaaaagaagcacagatggggaaaggtccgacaaaaggcagctggtgaggagaaaggttcgggtaagggtcaggagagaggaaggctgcatgctccacttccgcccctgaggacctccaccctgccccttggagacccctgctaccatctaggacctactgcacaagcactaccacagcagacaactagcaacagcggatacaaaaagaatttgttttaaagatgatttctatggttactgagttaaaaacaatcttcaccgtaagtctaatattaacacagatttcaagctaggttcttctcttctacacagaatgtgtaacaagctgagtgtataaatgctgaagtggcaagaagaggtccaaaaggaactatcggctctgctgatgggcatcgaggaacacgtaccacactaactaacaagaaagagcacacatatataaattaaacacaaaccgaattctctgtcacatcctagtcaggcaaccgcagaacccactaacactggaactgtttattaagcctgtaagagaaggctaaataagcaataaatagcactggattcaacatacttgaaaagtaactcatactaagaattcagtgttttataaaaaccttttccatcatcaccagctctgatccttatttactttacccttgagtcacaaactgacctgcagccaatcagcccacagaagtgctttattgttctactgtgttttataaaagcaggagactttctataaaatccattttggggcacatccctaccctccaggcatgccctgagggatcctcatcacttactccacccactgcctttcaccctcacggaggctggtctgtccaataaattggactgattttgaacccagtcaagaaactggtgattaacccgtatttctgcctcctggtgacaattaccatcatcttaagtattgggtgtctgatgactcagttatccatctatacatacacatccatgcacacctgactccaagatcactcgtgtgaacgcttacttaatgattagctcacagctgcttttctcaaagccatttcctttaggatctgggataatatagctgtaggctgcctgtataagatgcactgattctggtgactccactcacaacagggcaaacaactgaaacaacaatccccaacttctgctgatggttgcctatagctgacaaaccagttctctagcacggtacataaggcatggaattcttccttcaacaggggcttctagaagacccatgataagcagctctgtcacaaggttctcttcacattagggggaagttggtttccctttagctgctagttcctgggctggattctggtcaaaaaccaacttcaacatcacaaaactattcatagaattgagactcagctttcctaaattcgtggacactttttaattataagcataaaagaagaaattgttttaacagacctaaaaaggcaaagtctacctaaaggtcagtggcctcacacttctacaccccaactctcagttctgaagcagataatgcaagtcattcccacatccaacaacacattctctactacaacagtgtacctggcatcaaatgtcccttataaagtgaaaaaccacggaacggctgcattgtgtgctacacacttaacactatataacaggagatttggctgataaaattatactgtcaaaaataagtatttataccatataacatgaatatgaaatattaaataatttaagacacaactatcaacttctcttcagtatgtaaagaaaagcaccaagcttcaaaatttaagaacattaaaaattatagcagaaagcaggctttaatacagttaacattaccacagaacagagacaactggagaaggtacagcccagtggtcttcaagccctgagctgccacggaatggcatgaacttacccggttttcatcataaataatttgaacaacactgcggtgcttctgctccacaggaggcggggacacaggcttctcgggctctggaggcttcgcggcctcctcttcaagctgttgctaagagacccagaaagggagagtcaggcatctgctgcacgtcagccccaccaataattattcaccagagacaacacatgcttctgagcaacgcttcgctgattctacagggtaatcacttaaccgacaagggtctaaggacccaaaggccctaatgaacccaaccagatttattttgactaataactaaacagcataagtcatcttttgatagataaacccttttgtattctaattctgataaatttaaagcaaaataataagggaatctaatagcaaagagagataaggccttcttcaatgaacagtgcaaagaaatagagaacaatagaatgggaaagactagagatctcttcaagaaaattggaaatatcaagggaacatttcatgccagtatgggcatgataaaggacagaaacagtaaggactaacaggcagacgagattaaaaagaagcaggaagagtatatagaactacacaaaaaaggtcttaatgaccaggataaccatgacggtgtggttactcacctagagccagacaacctggagagtgaagtcaagtgagccttaggaagcactacaacaaacaaagctagtggaggtgatggaattccagctgagctatttaaaatcctgaagcatgatgctgttaaagtgctgcattcaatatcccagcaaatttggaaaactcagcagtggccacaggactgggaaaggtcagttttcatttcaatcccaaagaagcgcaatgccaaagaatgttcaaactactggacaactgtgctcgtttcacatgctagtaaggttatgctcaaaatccttcaagctaggcttcagcaggatatgaaatgagaacttccagatgtacaagcttggtttagaaaatgcagagaaaccagagatcaaactgccaacattccctgcatcacagagaaagctaaggaattgcagaaaaacatctacttttgtttcattcactaagctaaagcctttgactgtgtggatcacaacaaactggtaaattctttaagagatgggaataccagaccaccttacctacctcctgagaaacctatatgtgggtcaagaagcaacagttagaaccttacatggaacaagtgactgattcaatattaggaaatgagtatgacaaggttatatactgtcaccttgtttatttagcttatatacaaagtatatcatgtgaaatgttgggctggatgactcacaagctggaatcaagaatgttggaagaaatatcaataacctcacatatgcagataatatgattctaaaggcagaaagtgaagaggaactagagagcctcttgatgaaagtaaaagaggagagtgaaaaagttggcttaaaactcaacattcaaaaaactaagatcatggcatctggtcccatcacttcttggcaaatagatggggaaacagtagaagcagtgacagattttgttttcctgggctccaaaattactgtggacagtgactgctaccatgaaattaaaagacacttgctccctggaaggagacctatgacagaacctagacagcatatttaaaaagcagagacatcactttgctgacaaaggtctgtatagtcaaagctatggtttttccaatagtcattacagatgtgtgagctggaccataaagaagtctgagtgtcgaactgatgcttttgaactgtgatgctggagaagactcctaagtcccttggacagcaaggagatcaaaccagtcaaatccaaaggaaatcaaccctgaatattcattggaagacctgttgctgaaggtgaagctccaatactttggccacctgatgcaaaaagcagactcactggaaaagactctatgctggaaaaaagaaggcaggaggagggagcgggcagaggatgagagggttagatagcatcactgactcaatggacatgaatttaggcaaactcctggagatagtgaaggacaaggaagcctggtgtgctgcagtccatggagttgcaaagagtcagacaaaacttggcacctgaaccacaacttaagtacgagaatctaaatgtatgaaggtattgcatctgcctctatcacaaggaccctctgtgtccctggaataatgctgttctgccttatagacacacaattcctgctaatgtctggcagagacagcatggtagaacactgaagggttaacccttaactcagcacagcaccaccctctaccccactcccccatgagactttatattctacagtgaggaggtggcaaagtcgaaagcacatgaactgctagtatgtgcagccacaacgcaggaggctatctgaactactctgcccaggttcagccctagggtcaccctttacaagtggtttgatccaaagaccctttctggttcttacctcaatctggagcaagtgtacaaacccctcatatgtgaagtggggatattcatcctacctaccacacagctttctgagaggattaaaggactcagtatatgtcaagcagaactataaatggtcagtgagtatcacctactgaagtaagtagagactgaacttggttcactgctttttgtcttccatcaccccaactgatacctagtaaatgctcaacaaacagctacatggatataatataaaaggcattaaggtaaaaggtggtaagtctactaaaggcccagcggaaaaagattacctacatttccaagtaagacagagtcaggttcctcatcatgtaagtcagaccacacccaatgaaaggataaaaatccttcaagagggaagctttgaggtctacttccactttggaacagaaaggactcaaacgatagtattcggggttctgagatcattctcatgttaatgaggtctccaaccctgcccttttattcgtttgctcagaaggccttctttcagaatgtccattaagtaggtatagagaaagaaataaacaggtttcaggaaatcacattttgttcttcagagttaagcagccctgggacaaaaccacagacagacaccagacaagctcatagattcaaacagactggtggttgcaggggcaggcaaagatggaccaaatgggtgaaaggagtcaaaaagtataaacttccaattataaaataaataagggatgcagatataaactatagttgaccatagtttggtgactatacttaacaacagtttattgtatagttgaaagttgctgagagagtagatgttaaaaactctcatcaaaacaaaaaaaaaaaatctgtaaccatatgcagtgagagatggttaactagctttactgtggagatcattttgcaatatatataaatataaaatcaagatgctatataatgttgcgtgctatataattttaccccaatcttcttttaaactgagaactactaggaaaaagagataaatcaaaaatccagatatctactacatttctacatcaataccacaaagaacacaaagcccagaaatcagtccaaacctgatttataatagagctaaaaatgcagctggaaaaggatgaactttttaataaattattaatatgggggaaaaaatattgacttttatcttgaggcagacacaaaaactcaacttctggtggattaagaataatgtgatgagaaactataaaatttcttaaaagatgataaactcttttcatgatcccagggtagtcacatactaaaactacagaaattcttttcaccaaaaatgctgacctaaatgtaagagctaaaactataaaacccagagaagaaaacataggtataaatccttgtttggattaggcaacaaggattatggttcttagataatctgacaccaaaagcacaagtgatgaaagaaaaaataaactggacttcatcacagttaaaactgaaagctttctgccctggtgtgactccatcctgcttactgccctctgcaagtacagtcactcacctctgcccactgtctctcccacctacaggtgtgcccctgggggccttggaaccacctttcagttgtcaactaaagaccaataaagatgactttaaagtggattatgatgaagatgagcagttatcttgagataggtcagttatactcagcttggactctgtctccttttcctctctccagagaggtcagttccaaggctggtgcaaaggatgaagtgcacactgctagagcagaggtggtcccaacgaagcagccctggccatgctaatttgtccctggggggctgaatgccaactctggtccaaaagtggttcagggcttgtagttattagtggacagctcttagaagatgcagaataagaagacaaagaagacgacgtgaaactctggaatacatctgcaagtggtagcaaggttccacagaaaataagcaaaacttgctaatgaaaaggaagctgaagaaaaagctccaggaaagaaatctatacaagacactccagccaaaaaggcgccagatcaaaccagaatggaacagattcaaaaccatcaaacatcaggaacaaaagtcaagaatccttcaaaacatacagtagcctgccagactcctctgtccatgggattttccaggcaacaatactggaataggttgccatttccctgtccaggggaccttcctgacccagggatcaaacccctatctcctgcattgcaggtggattctttaccgcttgagccacctgggaagccctcaaaacacactcactcgctcacaaacctcctaaaacaacaaaaggacctagttctggagaagatgttaaagtaaaactgcaggcaagtctaggaaaaagcacgatgaacagtcctcataaattaagacagggagagaggaaaaggagacagagtccaagctgagtatcactagcaattcagaccaagttttctactttaacctcaactccctctcctgatttaccccaccacaacccaccaggctggaagcaatctcactccggcttcataaagcacttgtgtttgatggctacgagtcagtgaatcttatactttgctttctattacttattcatttgatttacctcttttaccatgttttaatcacttttatatctccttagatgctcaataagaattttaacgaatcagaagaaaaaagagtttcttacatcaacaaacactatcaggatagtgaaaagacaacccacagaatgagaaaatatttgcacatcatatatatggatattcagaatatataaagaactcttactcaacaataaaaagacaacgcagcttaaaaaaaatgggcaaaggatctgaataaacagttctctaaagaaaatatacaaatgaccaacgcacacacaaagagatgttcatcgctggtcactaaggaaattaaaattaaaaccacaatgagagactacttcacatgcactaggatagctatttaaaacagtgaagaagagagagggaaaccctccctcagacactgctagtggaatttaaaatggcacatcaactaaagttaaaaatatggaaagttcaacactcttctttaaggagacaaacattccaagaatgtactaagcagtaaaatcagacacttacttgtttttttttcagtttaaggatctgctgctctactttcgcaatttctcgatctacacgatccatactctgtattaactcttcctttgaaagttttgaaggtgaagcattttgatcatccccacacggttgcccagagattggagaggaaggagcttcatgtttgactccaaatgccgggtcctttaaagaagaaaatcaagaacaaatggtttctcactaaagatcaatgtcagcatcaagtctcttaaccgggacttccctggtggtccagtggctacgactctggttctcaatgcagggggcccgggttcaacctctggttggggaaatagatcccacatgccacaactaaaagatctcacgtgctgcaactaagacccagtgcaggcaaacaaataaaaatattttttaaaaagcatgatgggttcattaaaaaaagattctcttaactgaaaaaaagtgcgttttaaaacttagcaaagccatgtgtgctccctttctacacagtagcctatagtagcaattttctcccttcttcccgcccaccctccctctctctctctcacacacacacacacacacacacacacacacactcacactcacatacacacaccactgatgttcacagttcagacatatcactgaagatcccaaaagctatacaggttgaggtggttaagtggccaaccagcctttactacaatactgagacatacagagaatttctgcaaaaataacgatgcaatcacaacaaaggaagatgccaattcctcagccattttgttgcagtgccactccaaaacatctgaacacacgcactatgtgtgtccacccaacttaacagctacaaatggccattcctatcaaaagttttcaggctttccaagggctaatactgatgtacataagtctggggaatgacctagaacttttgatgctttgatcaccctcaataaggagcaactaagcctgcccgccccacagcacatgtaacatctctccagccaaatgtacctcctcacttcagctccataatgagcaaggactacagtagactgaaggcctccacccaaaacctaccaccctaccaatacacgcacgcacactcgcacagcctactcatctccagtacaaggtgaagatgtgagcaatactgcaaagcatatgaatttcagattaagacactggttctctttaggttgtaagaagtctagaataagcacagttcgtaagaccaaagggccctcaatgtattaaacaatgactaagtaactgagaaatcaatagttctaaccaagaatgcactcaaatatacccagatagttgttccaaaacaccatggaacagagattaactaaaatttaacatgtatattcctgaaaaatctgatattctgtaacataatatagctaaattaaggcttctggggaaaatgggattatagttattacttaaaacctgtaaactttgcaagcagagcattaacaaaacaacagcaactctaataaaataatactgtcaaagctccaataaccatttgcattcagactacagtcaatcctttgatagctgtaaaccctgcagtttatgcttcctctgttgatcctttgggtcatttgcttccagttcaaaatagcacacttcatcataatgttaataaaaatcagatttgtggtataaagactttgctgttgtttagtcactaagttgtatctgacgttttgcaaccccatggactgtagcccaccaggctcctctgtccatgggattctccaggcaagaatactggagtaggttgccatttccttctccaggagatgttcctgacccagggatcgaactcatgtctcctgaattggcaggcagattaacctttaaaaacataaaaggacaggaaaaaaggtctcacagtttcttttcaacattccaatcttcattagttagtttaacattgaaaagcagagcagttcttgaactaagctagctactacctgcactaaatgaaaaccactgatagatgcagactttcccaatctttttaaggtcttcatctatctagaaggctaattcttaattatgaaagcttgatctctgaaacattcacgtgcaacaatcattcaccatgaatttccatgttacattaacatcattctcttacatatgcatatgagatcatttgtgttacaaacacatataataccaaaacagattacattacgactcagcagattttgaaaatgcttctcaggtgatctgtctgacctgtgccctaagaactactattacagatcaatatttcccactgacttcacctctagttaaatatttaacaaaaaaacaaattcctgtttacagtgcctatcatctgacaggcactaggcagaaaggtaaacaaaacaggcttgccatcaaggagtttataattttgtgctgggacattctgttagctatttgaggggggggggagttaaatttctatcccacatatcacaacaaaagccaaataataatatttatatgagatttattaacaaatcacaagtagccacaaacaaaaggtattcatattatactgagtacaggaaagtcaacagcaaaagacattaaaaaaacatcgatgaatcaaaataaagaacaattttctctttatcaaaataggaataaatttacaaggcaaatgggaaaaataatttgcaaaacgtgaactctaacaactcaacataaaataaaaaacacatcgacagaaaactaggcaacagatatgaaaagcaattcataaaacaggaaaaaaggaaaaataaatgaaaaaatgttaaattttaataacaagcaaataaatgcaagttaaaaatttatcaaactaacaatgatctttttaaagaatgtaaatatgtgatttcagtatggacacacagctaccgggcgctcttacatcatgctgttagcagcaagaactggttttccaccttttcaggggaaactggatacactcgggaaaaccttgaaatacgctaacaggaatttaccttaaggaagtaaataagaatgtaaaccaaaaaaatgaacctagggaattccctggtggtccagtggtaggcctccacactttctctgctgagggtacaggtttgatttcctggttggggaactaaaataccacaagccgcacacaaaaaacaaatgaacaaacaaaaaaatcaagctaagaaaaatatgtcattattctaatgaataagcaggtaacctacatgtgtgacaagttattttatatccatatatggaatatgactgaaaatacaactgtaaacttaatgacacaaaatgaacctcagaacctatttaagcaaaaataaagtcatacacaatgcacaaagtaagcacaataaaatatgcacaattattaacgacaaactggtgagacaactttttccttcaagcttatccaatttcattcttctataactgaagaaaaaaactaacaaatgctaaccctttcaaaatcccaacttctaaaataaaaggaaagtcatgacttacagcttaggcaggaaagaaacaagactaggaatcagaggtcatgggttttcatttcaactcaggaaacattacctaggtcacttagtttttcttaacatctgtcttctctactataaaatggaaatcagctgtactctcatctaatataaatggattaagttttaagctctctctctgccaaaaaaaatctatagctataaatacatttgtgttcatttattcagccttgcaagaaaacctttactcacttctttttttccttcttttttaaatgctgcaaacattccttataaacccacagactataatacagatattttacatggtaaagtgggtctcaatattcctaggagtttagttcatttctagctcatcacaaagagctttacccacccaacttactgtttttaaaatttcaaatttacataagagttgagagactagtataatggattcaattacccttcatctagcttcactaattgtaacatattgctgtatttgctttatctctctgtatacatatacctaccttttttttccacttgatctatttgagaataaagtgcaaacatatttattgtcttttatttaaatcactgttcactccataaaaactcaaagaaaacgtgtaggtatttagttatctgatattacggtgcaaagggccactagccctaaaggcaaacaaacttttttggaaagagatttaagaacgaaaaagcaaagataaagagatattaatattgatagtaaaagggttaatactttctgttaaaaaagcattttaaagaattagtttattctttctaaaacaaatatttattctgtacctactaagtgccaggtaattcctgatctgaagatctaatgacaagcaagatagttaaatacgataaactgaggaacaaaataaaagtataatacagaaacatgcacatcaccaaagaaaggcaagtaacaataaacaaaaaaggaaaagagatatgatcttaatagaaccttctcataaacccacaacacatagtgtttgaaatatcatgagatcactggaaggactgatgttgaagctgaaactctaatactttggccacctgatgggaagagctgactcactggaaaagaccctgatggtgggaaagattgagggcaggaggagaaggggacgacagaggataagatgactggatggcatcaccgactcaacggacatgggtttgggtggactccgggagttggtgatggacagggaggcctggcgtgctgtggttcatggggtcacaaagagtcggacacgactgagcaactgaactgaacttattgctgttgtttagccactcagtcatgtccacctcttttgcaaccccatgaactatagcccaccaggatcctctgcccacagcatttcctaggcaagaatcctggagtgggttgccatttccttttccaggggatcttttcccaacccagagattgagctggcatctcctgaattagaaggattctttaccactgagctactgtttggaagcccgtcatgaaattatagctcatattaaaagtagttatcactaagagaataaaaatttttctttacaaaaattataagcatagttaaaccttacctaaaacatgtcttctcccatgtagtaagttaataaactgcaactgaatttaaggggattatttaaaattcaatttaataaaactgtgacagtcttgagtagctctgactaaattttacagcccagcaagctggtacaaaatgcttgagagtcattcaatagcaatttttctttacagcagtcctcagattgtttctcatttaccaaaaagtcaaaagtactgactttaaagtctggagtattaagtctgtggctttctagttttgtttaaacaaaatttttactttcccacagcactaacctttggtgaatgcaataactggtctttcttttaggcactgtgcctgaatatggctaaatacacatttcagaccgacaactccacagggtaagagaacaaatatttaccttcttagcatctccagaagatctcaacccttctggcaaagtgtgcactaaaggtaagaccgcagcgctgacccgctggaaatgggaatcagaaagctgctccagacgcggtctcttggagtccagtgaatcatgatcccctggggaagggcctgggtgaaactgctcatatccagttctcctttcttgaggcctatcacacacagagaaaagaatcactcgaaaatgtttaagtaatgtacaacttcctgctaatatccctggttgaactttgaaatgaatgagcagttacacttactttcaaagtgaaaccacccccaccccaggagaacacatacctcactatttagtcctattaaagttctgattctaacagaaaagtttcttcttttctactagaaaaggggaggtaggagtagaggtggtaaagtagtgaaagatgcaatagaagattcaatttgcataaaatttaaaaggtgctaaagaatatccataaaataattatttttaaacccatgccataacaactgaagtaatataatctagactagaaaagccactcttttcaatcaataataaaagcaagcagggaaaaaaaaaaatccttcagcaactgccacatgtaaaaataaatgccttgagttgtgaggtattatcaagacttaaaaacaagtgttttgagagggaatgcaatattgctttgaacacataattctgaccctcaaaacatgctttctgtctaattttccccaagtacctaagtatcttgaaggtcaggaatctggtttcaatttctttacatgatatactgtacagagtatttacaaagtatttccagacgcgacatttacttgtggccaaggtttaaatgaacatctcacaaaacaacttttcattttgaagttaatcatggggttttgtttttagtataggtgataaaacaaaccctgaggttgataatttcataatacttcaaaaatctgaaatcttattcaagacataagatcccattgtctccttaaaattcacaatgatatcataaaaaatactgcaatagaaagtttcaagaataagacaaggatgacagttttagccacttgtattcaatatcgtactgggagttcttatcagaatattaggcaagaaaaagaaagaagcatccaaactgaaaaggaagaagtaaagtatttctattcacaaatgatacgatctcatgtggaaaactctcaagaaaccacaaaaaatgttagagctaataaatgagtagggtgaaattatgagattttaaaaaaaaatcaacatgttaaaatcagctgtatttctatacattgacaatgaacaatccggaaatgaaattaagaaaacaattcccaccccccaaaataattccacttataatagcatccaaaagaataaaacaggaatgaattagaccacggaggcccaagacttacacactgaaaaatcacaaaacattgctgaaagaaattaaggaaaatttaaatagtaagacattccattttcatgcactgaaagacaatattgttaagataacaatactacacaaagctaagtatacattcaacataatctccagcaaaatcccaacagagtttttttgagacattaaaaaaaaaatcacaaaattcatggagatgggaatgccctagtggtccagtcgttgactcattgttttcactgtcgtgggcctgggttggatccctggtcagggaactaagatcccacaagacaggtggcgcagaaaaaaataattcatgtggaatctcaagggattgcaaacagccaaaacaactgtagaaaaaaatatatataaagttggagaactcacactttacaatttcaaaactcactacaaatataaaataagcaagagtatggtacagccagaagggcagacctacagaccaacagaatacaactgctgctgctgctgctaagtcgcttcagtcgtgtccgactctgtgtgacaccacagatggcagcccaccaggctcccccgtccctgggagtctccaggaaagaacactggagggggttgccatttccttctccaatagaatacaactaagagcctagaaataaactctcacatctcagtcagcctcaccaaggctgtcgagaccctcccacaggcaaggacaatctctgcaacaaacagtgctggagaacggaatttacacacacacaacaatcaagttgcactcataatggattataaatccaaaacttaaaaactcctagaaacaaaatatagggaaaatctcctgaccttggacttggtagtgaattcctggatatcacaccaaaggtaaggcaacaaaagaaaaatgtagatgattggacttcatcaaaataaaaaatttttagtacatcaaagaacactatcatgagaatgaaaagacaaaccatagatgggagaagatatttgaaaatcatgcatttggtaaggctgcagtatcctgtctgatgcccacattccttctccccagctctctctctgacacattctctctgcttcagtctacccacctaaaatccaccctccacagagcagccaggggcaatcagataaaggccatgcccctggttgcagcactgagaaccagggctactgttggcctgcttggagattttgtgtggaacttctataagtaaaggcaaccctctggggcccctagctgtgtcccccacaactgggcaccactgttcaggacacaatccacaaaagctaactaacttccaaggatcacattttacctgcagctactctacctgggagactgaccaaagccagagggtgaggtgtacccacagctggaggagaaccccaggaagccagggcacaggacaataagaaaaacagagtgttgaaaactctcactccatcaagaaatcaaactattccccatttcagcttgccaattctttttacaacaaaactactcatgcataaataaatatataatttaccatttaaaatttcagaaaaaattttaaatgaactatgaaaatcttggtgaaaacaaatacaattttatattgggagttaagcatgaaatgcgcatctttaacaaagtatttgccttctaaaaactaatactgtatgatggcgtggccactttgtacacagtctggtagttttccaaatggcaaacaaaaagggccagcacctaatccagcagttccactcctagtatgtgaccaagaaaaggggcatatggaacttcccaggtggcactagtggtaaagaacctgcctgccaccgcaggagatgacggagacaagggtttgatccctgggtggggaaaatcccctatccaccccaggattcttgcctggagaatcccatggacagaggaggctggtgggctacagtccatggggtcacaaagagtcagacacgactgaagcatgcatgtggagtataaaggggtatatagacagccaaagaaaaatctgcgcttggatgttcacagtaatattattcacaacagtcacaaagtgcaaacagctcaaacagctatcaattgatgaagagaaagataaaatgtagtacttccaaaacaaccaaaaaaaaaaaaaccccaccagatttcacactaaaatatctctgcagactcttaaatttaaaatttcctacattttacagacttatcatcatctcatgaacggaggagcctggtaggctgcagtccatggggtcgctaagagtcggacacaactgagtgacttcactttgactttcatgcattggagaaggaaatggcaacccactccagtgttcttgcctggagaatgccagggacgggggagcctggtgggctgccttctatggggtcgcgcagagtcagacacgactgaagcgacttagcagcagcagcagcatctcttagtaccatctttaaatagctttagagcaaatttatcaaatggattttttattgtaataaaccttcacttaggggtaatataaagttcatagctatttaaaatactggcccatgaagatcaatcagaattataatttattgtgtttattcccagctgagggagactcttgtccaaaacaaaattaatttcacttaaattttaatatgtataaatatgagttgacctctctgaatttctgattctctgaatttcagagaatcttttatagtatctgaaactacctcagttgttctgtacctatttaattaaacatccaaatactctaggtgttgtatgttagtcgctcagtcatgtttgactctttgcaaccccacagactgtagcctgccaggcttctctgtccatggaattctccaggcaagaatactggagtggactgccattcccttctgggctaatttttccaatgaaatctagaaaacatgataaatgatattcacacagaaataactctttttgtgagtgctgtgtttataataaacatttgttaacaaaaaaattccaggaatatattaacagagctaagtagcaaattaccccaaatcccaccacatagcaatagctgtaatcaggggtgagtttcattaccagacatcacttatttctacatacggatgtacggacatacaggtaaaaataaaacagaagaatcacatagagtattttttaaatacagaatatttggtttattttatacagatacatatatgagaaaaaaatgaaataaggcttaaaaatggaaggaattactacattccagttaaatattcctttaatgcaagaaatcagttccttaaaaattctttctaaagggtgaaagtgaaaagggtaaggaaaataattatgaaaagcactgagaagaggaatttttttttaacctgttttcctttttcatcaaatcactccaggcatacttttcaaatgcatatctttaaacattctcccaatacttattgcatctctgatttgggggacttacattattttactttgtcaagatttagtactaacatccgctaaggaaccatgattccatgattcctggagatgtctcatatggaccctcacttgaatgggtttatggctactgtaatcctttgaccatggcttccactccttattcagctgggttccatctctgagaaattcttcaagaagctttaaatactcagtgttttcatgtctaaaaatgtctgcctattgcttttaaacatgtctgatataatattttcggatctcaatttcttctcctcagaactttgtagctattgctctgtcagattcttttctcttattaaggacttgttctgcttgctagattcctgattcttttacttatccttcaactttaataataattcaaccaggatctgtctcagtattgatcattctgtgcaaatttttcctggagcaagatatgtcctatcaacctacagatttcttccctcacattaaaggggaaaaaaggtggtttttgtttttttttaattatgagtatcatttcctttcccttactaggttctccatctaggaaacacatgtgcttatgacatgttggatgattttaatttgccctccgtatttatcagcctctttctaactgctttgatctctctgtccttttcttctgccttcactctgatcatctcaagacctttcttccagaacaaaggtctgactttcagccacatctatcttatcccttgttccttttcactttatatacagaatttaaaatgtggccttgggggcaaaggaatgtccaatctcgctttatctgatacggttggtcttattttgtttttaaatactttattattaatttattcttaagtgcacagtattcatggggcatgttctttgtttttcatcttctttacacacaagggtctttgtttttggaacagtgcattgcttgagtcttcctttccaggagaatgctttcctggttcacaacatccttcaccctcctgctcaggcagactatgagcagccttacacagactcactctgtggtaaagaatggggtggggtgggggggtgcggtttccttgctcatctccaccttgcctggtatgcatttatctacagatggaggactggatatggctttctatataattctctacagccagaggaaacaagagaaatggggcgagtcaggggaaaactcagctggggctatgatccttagccttggctccaccagtcacccatgtaaccagttctgagggctctggctcagcactttgcaaagtggcacctataactaactatccttaccacaggatggcataatgaggattcctaagtcaaccgatcaccacatcaccacctccactttcattttcccaaatcaggggcaatcatgagaaatcctaggactgtactagcctttctttcttcaacactgcttctttgacagtagaagcaggaattaggaggccaagttgtgcaagattcttctcattccttccttgaatgccactcttccaagttgatggcagtggctgtatcctttccttctttatgtgcagggtgcatttttagccctttcttaaaaaaaaactatcttcgtatatttgctagacagcagaggagagtgatcttatttctctccataatcttcaccaagaaatacattttacaatgattttaaacatggctgaataatttcaaactttttatcatcttaaaacctaaacaataaacatactttttaaaataggaaatcaggttctttataaaactgctaaaacaaggattcaagaaaggtgatttactaaaggcagttatatttcaaaatactttagattaagagtgagaatgggaaaaaaaacacagggcggggaagcatggaattgagtaaaggaccacagagacagtaaggacactggagagaatgagtatctgacatgggccaacattagctgacaaaatacccactatcctttgcagacaatgtcttgttatcctcattttcacaggtagaaatttaaggtctgaggcgtctaaatcactgactagcaaccctggctgtgaataagaaagacctgggcctaatcccagggactaatttaattattctgagataagattggacatcaagctcttaaatctccccaggtgctcctaatatgtagggtgaattcagaacaccagcttatacagtgtgaccaaggccccaagagctgaccaggattcaaatctaggtctgtcggactgccctctgcacagcattaactctgaattctggaaacaaggttttaagagtttataaactattattgacaactactccaaaaggtcaacaaatataaaagcactcaaaatacaactgtaaatgaccaatcacagcttggttaataagactattaagactaaatataacactgaattaaaagtaataaaataaatgacacacgtgtggagtttccacacactccccaagttcattcctgtgtgaaaacacggaagagaacctgttacctgtcagaacctgggtgaaactctgaaagtagggaaggcctcctgcgaagctgctgctgctgctgctgctgctgctgctgcaagagctgtgatgcctgactgacttcaagatgagaagaacggtaatcagggaccgcaaactcctggtagtaaaatagtgacatattaattattaaccaacaagcagaaagcatcatgcaaccaaagcaagggcaaatgtacaaaggcagttacggtccaataagcatgggaagaagcagcaatgatgattccagtgcttcactgacctaattctcttcccataacctaaaacaatcaacattaattgtgtatcactcaaaagaattcaaaatgaaatttcgtgttcaacctgtgttttatttattcttctaataacgaatcacagtaactcctaatctgtattatttacttaataggatctcaaacccatgtgtgcaatatgaaatcctaagaagtatccctatcttaaatttaaaatggataagctgaagggtcacagaagccatctagttaaatccatgtatagtcacaagtgaagaaacagaggcccagaggatcagcacgctagttaagagtaacagtttccctcattctaggtgggtgtttttatgtttatcttcctattttttgaacagacacacgtaacaggtaaatacaggcaaagatagcactgaggaattttctcagaacacagtagagcacaaagatacaggaattacagaaggaacgttagaaatctcagctacagtaaaaggctctaacattcaatatccatccacaggtgagaggcaatattctaagaaataaaaaagcagcatttctcagaagttagaaaggactcagtcctctcctcaggtttcaaagggcctaagagaaaagttcagcatactttaaacattaaaccatactggacatatcagaattttagaaaatgaacaatagagaaaaccatcagtcataagacagaaaaacttggtttcctacaaagtaagaagaatcgtaataaaaaaagacttctcatcagcaacactgaatagaacgaaacagacaaatacatattccaaattcagaggaaaacaaatctggaaccaaatcaccaagggagttagagaatgatttcctgaaatatgaatttgggttcccctaagtgcttggctgaattccaatctgtaatgcataaggagagcacagtcctgtctttaaaaggctggaccaagaacaacttccgaaaaaagaactattggaatgataaaacaagcaattcccagagctcccatagggccagtgaaagtgaaagtcgctcagtcctgttcgactctttgcaaccccatggactgtagcctgccaggctcctctgtccgtggaattctccaggccagaatactggattgggtagccgttcccttctctaggggttcttcccaacccagggatcgaaccaaggtctcctacattacaggtggattctttaccaactgagccaccagggaagccctacacatggccagagctcatttgaacttcctccagccagagacaagaaacctcactgaatacagaagacatttagtagacaccctagaagaggaaagttcagaagtggaggatagggtttccctggtggctcagtggcaaggaaaccacctgccaatatgtaggagacatgggttcgatccctggtctgggaagatcacacatgccccagagcaactgaagcccatgtaccacaactattgagcctgtgctctagagtctgggaaccacaactactgagacctcgtgccctagagcccatgctccacaactaaagaacctactgcaatgaaaagcctgtgcaccaccactagaaagtagcttccacctgccacaactagaggaaagcccatgcagcatcaaggacccagcatagccaaaaataaacagataaaattatttttagtttttttaaaaaaagaaaatacaggggaagggaacatttcccaggctaacactcctaacaggctgaatgctctcctcttaagatagaaaccaggcaagaacgtccactctcaccttctactcaacttggaacaggggtggggagggtaggaggggtggtggggggtaggggtggtggtggggcgggcttctagccaatgcaataagtaagaaggagaacagacacctagtgtgaaaacagaaaagcaaagctgtctttattctcaggttacagtatcatctacacagttaatcctggggcattcataaaagagcaggaagtaacaagtaattttgcaggagagaagattaatatacatagcagcagtgaactgaaaactgaaatttaaaaagcagcaccagttacaacccaacaaaaatactaaatatttaggaataaatgtgacaaaagaggttcatgacctgtacactgaaaactaagtgactggatacatacacaaactgtggtatatccatatccagcaataaaaagaaattaccaagatgtgccagaacacagatatatttcaaaaatatgagacagaaaagaagccactgacaaaagcattcatgtgaaattcaagacaaagggaatctgtcgtgatgggaagcagatgggtatcctgggagctgagatctgtaggaggtgggggagggggcctgagctggacagggaataagggaacttcctggggtggcagaaatgctctctctcttcattttggtggtagtcttataggtgtatgaagctgttaaaatgtacacatacaatgaaacgttattacatataaactaaacccaaagttaatttaaaaacagcagcagcaacaatacgctaggaaatcagtaatcagatgaacagcactgaggcagtaaggacacacaacccaaagccaacacctaatcacggttaagaacctcagcgaagagtagagagtgacttcttcaaccaaaaagggcatctgcaaaaaacatgaaactaatgaccatttcatctcttcccatctctttttttcaaagcttacactcatggccctggccggctccaagctggtaaaacaatcacacaaactcgtcttcctaccatcaaatctcttaagggagaagttctttaacaggtcacaaataataccagtagctacatgaacacacatataggaaatctaagcttgagacctggctctcactcaagacaccaagtcttccatccagcttaatgctcaaccagaacctggcgcatacacataggtcttaacttagaaactctaggtcattgacactctatcaacaactcctaccatcagaagcagagacatggccaactcctggaatctggcataaagccacagtaagaagataaatatacttaatccttaacctttgagaatggttcctgccattaaatacacacacacacacacacacatataattgtgtttggtttctgatcaacaaatgtattacataggaaaagtagagagaaacatagaatacatatgcaatttgtgtaatatctgttccttacctgctggtgacgggtgctgggaaaggtatattgaacagagtggggaggataccgactttgttctgtgctgaatgctccttggttgggaggataacctgaacttgacattatcagtaaggatgtcctcaccaggttgtgagatcaagtgcaacaaacaatcatgcttctaggaaatcacctgtacaggatgggaaaaaaacaaacgataagaactaacgcaccaagggtgcttctaataacttataaccatacctgcataaacaaaaccactattatcagtaaagctttctcccgtatattaatacttacgcaatataacagaagttacaacggctttaaaaccagcaatgggtcttttcctctatactgaaaagaaggttctttaacatatcacaaataaaatcagtagctacatgaagtgaacacataaaatcttagctcaggagccagcacacagcagcagctcagtaaatacctttctttcaataattatctgaaacacaaatattaaacattacaaaaacaaaaatctatggctgtaaaactgtaaaaagtcaattattaaaaggattcaggaaaagttataaggttaagtgtttgtgcagaga

SEQ ID NO: 137 - DNA, 28159 bp, Hippotragus equinus
  source 1..28159: mol_type = genomic DNA
ctgatacgcagagtgaaaaaatgaacataaagagaaagaagtagtaatcaaatcaaataaccacagtgcaaatgcattcaattttaatctttaatagttaacattattgctttaggacatgctttccctgaaccaggaacagaatgctaattacataaaaatatacacatagaaaaagtagttctccatattcccagggaaaagacagtaacttctaggatactcaagtgttttaattataaagtcttggtcatttcacttattagctctgtaacatacatatttaaattaaacattattagacagccgttacaatgggtgcgtgtcaggtgccgttactgagtaaatggattctcccgtgaggggatgtgtcgtttcccccacccactgacaggcacggttaatgtttgagtatgtgacgcgtcgctgcacacgcataccctcttctccgcccagagcccatctgtgcatgtgggtgagctggtcaggtcactacctctctaacttccacagcaagacgagctgggcttgggcttccggtgcagacggaccgtgtctgtctgaatcaagggatctgacctatcctcggtagcgagcactcttcgaactgcttcctcaaaggctgctgcgacattcgtggcatcttttgcactcgtttcaaagtagggatagtcaccgttgtcccggcaccaggcttgggcttcttctgcagacacttgccgctcgctgatgtcaaccttgttgcccagaatcacaaaaggaaagctttcgggctctttcacatctgcgtaatatatgaattctttcttccagttactcaagttctggaagctctgagaatcatcgacactaaaggtaagcaggcaacagtcagaacctctgtagaacggcgtcctcaggcttctgaagcgctcttgaccggccgtgtcccagatctgcatggtgacaaagtgtccatccacctccaaatctttatttaaaaactccacacctattgtatggaagagctgggcatcaaacttattagtcacatatctgttcatcaaagaactcttcccaacaccaccatctccaaggagaatgactttgaaaagtgatgattttcctgccattattaatctcaagatctctgactgtggaaccctgtaaaacagaagagtaccatgacattcctttagacctgtacctagttccacgtgcctctctgaacatcagtgctaagggaaagaaaacgcagggaatacgtgacagcaagagatgccagctactgagctcggcacctcgcgccaggctccatccgaccatcactcccgacaaccgctgctgagggctcgttcttccccttcctctggtcacccttgactgaggctggcactcaaagccgagtctaacccccaaaccgttctctcagctcacaacaaaccctgccaccatttgttagagaggcaccaggagaccgaagagggcacatttccagagcaactgcaaattgccctctggtggcatggttcactgacggctttcctctcaggccagggggcttctagccaatcctctccgtctctctcccaacactatcaccataggagctggcaagcagggaacaggggacagagttcactgatctggctgtgaacagaccaaagccaaccacctgagtaaaggactctgttctcttcactgaggacacttttttgcattggctaacattaatgtcagcaccaatggaatttttatcataatatagtaacctagcacattctacccacaagattcgtttgggcagctccaacacttctgaacaaatgcgagcctgggctgtttgttacttgtatttagaggggggatgcaatgaaccttaaaccaaaatgtggtatggtgcccacgcttttaaggggaagccctgggaaggaccagaatgccctgggaaggactagactgccccgtgcaccagtgaggagggcaagggtggggtggggtggcagataaagactcagacacctatttacagcctggggggagcattgttcgtatttaaggcttctattttaactcttttttatggaaaatgtcaagcatacacaattttggaataatgagaataatataatgataccgcacagaccctaaacctagtttcaccaattatcaacttatagcaaatcctgtttcctccatagtgtcccattttcccttctcccaaattattctgaatcaaattatagcatgtagtctgtaaatatttcagtataaaatggctttcaagatattaaaatttgtagaagcagacaatctttagtaccgtctaacagtactttctgcaacgaaggagacaccctccatgtggactgtctgatatgacagccactagccacatgtggctattgagcactgaatttgtgcctggtgggagaaacgaaatgaattttaaattttatatagtcttaactaatttgaatagtcacatttaaagagcaaacagctatactggatagcacagccctacagcaaaaatggcaattaattttcccatgaaagtagataatgtgaatccctcaatgggaaggtagttaaggcatgaacaataattgttatattgactaggatgattcactgcagtagggacctccctggcggtccagtggttaagactccatgttttcactgcaaggggcccaggttcgatccctagttggggatctaataagattccacatgctgagccatgtcaaccaaaagaaaaaataaatcactgcagtaaacaaacattatctggcaatctcctggtatacacgagcatgacccagtataacgaacccagtataattgaacattccccataaccagcaagaattcatctcctactatatgctaccacactattcttacaaacatgtggcaacttgcccctcttattggctctctgacattacttactacagtaattactactataatctaaacaatttaaaattggcgcagcaatcagggagcatactagctggagactttccaacctcagcacatggctctgcccactgcccaggctaaattactgtcagaaaggaaactgaaactatctcaaaccctttcatttcctgacatagtaacagtgcactaaatcggttccttgtttaattctttggaatcttgctcacatgactttaacccagacaaaagagcagcaaaaccaaaaatgcacacaactattcttacatagggaaagtgaaagtactagtcactcagtcctgttcaactgtttgcgaccccaaggaccataacccgccaggctcctctgtccacgggattctccaggcaagaatacaggagtgggttgccatttcctcctccaagggatcttcccagcccagagatcaaacccacgtctcctgccactcctgcatttcaggcggattccagacagattctttaccactgagctactggggaagcatctgctaatgccccctccttaacattctttagtggtcttccagactcaggtctaagtccaacttctaaggcaagatacctggtcctgttccccatcctcaccatcagccattcagaaatgcactgtcaagtggaagtgaaattcaaatccacgggctcagcccacatactcacctttaccctggcccacactgctccccctgctggcaaccccacccactactactactactactactactactactactactactactactactactactaagtcgcttcagtcgtgtccgactctgtgggaccccatagatggcagcccaccaggctccgccgtccctgggattctccaggcaagaacactggagtgggttgccatttccttctccaatgcatgaaagtgaaaagtgaaagtgaagtcactcagttgtctccgactcttagcgaccctatggaccgtagcccaccaggctcctctgtccatgggattttccaggcaagagtactggagtggggtgccattgccttctccaactacacctaagtaacttggccctcagaatgctctgtcatccctaacactgtaaacttcccccagcagcccctcatttgaggactgttcctttcccagggttttcaagatacataaacacggacatttcatgttgtgttgtaagggtgtaaaagacgtgctcaattctagtctatcatttaccccaggactctagttacgtctctagttaagtgtctagtttgctagacacaaacttccactgcacagcatcaacttgctagtatctttacatcacattataaagcagactgtgcaatctaacaacctccagccaaacgagaggttacatatctaccgaattaagtcttagaaattccttgagatttataatcataacttttatcaggatactttgatagttcttttcttcttgcataataatgtgggatttgggatatgctagactcacacaccaggaaataggtacatttttttacatttcccatatataatttggggcctcccagatatcctattcccatcacttcatgggaaatagatggggaaacagaggaaacagtgtcagacttttttgggggggctctaaaatcactacagatggtgactgcagccatgaaattaaaagatgcttactccttggaagaaaagttatgaccaacctagatagcatattcaaaagcagagacattactttgccaacaaaggtccgtctagtcaaggctatggtttttcctgtggtcatgtatggatgtgagagttggactgtgaagaaagctgagcaccgaagaattgatgcttttgaactgtggtgttggagaagactcttgagtcccttggactacaaggagatccaaccagtccattctaaaagaaatcagtcctgggtgttctttggaaggaatgatgctaaagctgaaagtccagtactttggccacctcatgtgaagagcttgactcattggaaaagactctgatcctgggagggattgggggcaggaggagaaggggacgacagaggatgaaatggctggatggcatcactgacttgatggacgtgaatttgagtgaactccgggagatggtgatggacagggaggcctggcatgctgtgattcatggggtcagacacaactgagcgactgaactgaactgagatatcctatttgggagtatgttggcatttgctcaaacaactaatatagacatacacaactctctcagtctagctgcagcactgaatatagacacacatatggtaaagataattatacaaactatcttatttcccactgacatctaacaaaagttagcttgatgcaatctatcattaacataacataattagtttatgaacattaaaatttttccctttttctctaaaaacagaaaaatcctttgaaacctctttagtataagctgaatgaataaaggtatcctgctatgttcttttcaagacttaccttaaaatgtaatatgaagccttttatacttcaatttaagattgcccaaaggcaataatttttacccaagctaaaatgactttagcaatcagttaaacactatgaaaaaaaaaaagaaacatacctgtctcttcaccgtgccagactagagtcaagctcaacagggtcttctttccctgctgattctgccaaacctgttcccttggcagggacttcccaggtggctcagacagtaaagcgtctgtctacaatgcgggagacccaggttcgatccctgggttgggaagatccactggagaaggaaatggcaacccactccagtactattgcctggaaaatccaatggacagaggagcctggtaggctacagtccatggggtcgcaaagagtcggacacgactgagcgacctctttcattcattcattcaaacactataaagaaatctaaataagaaaagcataacacacaggccataagtcttaccttaattgttcagttcaaacatcatcattgtctgcaaagaaaaaatttgaaagctcaccttagtaatatacattgtctcttttcataattttaagagtaaacacaataattaaaaagtaaaagaaatgtctgacttatattagtagttagattcttagtttatgactgattcatgttgaggtttgacagaaaacaacaaaattctgtaaagcaattatccttcaattaaaaaataaattaaaaaaaggaaaactgcacctgcaagctgtccatgacctttctcagcctaaaagtagccctagaatcgaatactatactttgtttttttttttaagaagtttttcacatgtccccatccaccctacttttctaagtatcccattcagacaaatataaaatctggttaatatgaaatgtaaaacatttcattcattgttcaaattctgcccaaattttgagtgatttaaaataatcatattccagagaataaaatcgaggcaccaccgactcaatggccatgactttgagccaatctccgggagatagtgaaggacagataaacttggcatgctgcaccccatggggtcgcaaagtcagcagagcaactgaacaataccaacaaggataaaaaaaggaccactcaagggacaagcacctaatgttacacaggaaaatttgggctaaggcagcgcagaatatcgtgaagcttctttctaggtagccagagcagaggggaaactttgtgagttaacaaaaaccactggcagaaaggagaactggctccatgtgccaaaggccaagagcccatacccgtggccaagctcttggacaccctgcagcttcgggactctggcgacagcaggacctaccggagggctgaggaaagattcactgagacatggacaccagggaaagcggctcaccactgtgccaggctcatgacctgagcacagacagcttctgtggaacaaacacatgaagaagccttaaatgatagtttcatggaaaccagacaggtttcttttatggccatttcttcagccagatttctggaagagtcacaggcagaacaaataagagggaaatgcaggccgacattaggaagtcaaaggagcctagtcccacacaccaaattcagtgtggaggtttcctgggccaactaggctgtgctaaagcactagcctctttccatctaaaccaacagtttcaaactcctctccctctcttttttaaaagcaaagggcatttctgcaggacttacatgaagcagccttcaacttataaattcaatcaatgaaaaacacaatacccttcaaaatcttgacatttgggagttaaggacaaaaccaccaccaccctcacaatgactgagcccttcaggccaccaactttgcatctctgcatccactcgccaccagctaccctaggggtgaggactctgactcagagaggtgacattccttgctggtggtcacatagctaggaaagtgtccaccccaggggcctctgaccctgccaagtggctctgaccactgcacagctccatctggaggaggaaggaactgggagggggtatgactggaaccaggaagtgggactgaggtacgaaggcacccacatggccagggagagcccagggtgggcagggcacctggagctagcagtgggggggtgccatgggggcgccatggttggagagagaaaagagctgtgcggccacaggacttcaggggcaggccaccagaagatttctgccaatgcccttggagtgagcctaactgcatccctgagcagatgcggagtccaaaaaagcatctgtctgcgatcacaagagcaggctgtggggagggcagaagggaggcctggggcagagtggtggtggctcacttaccatccctctccaactaccgacggtgtcagcgggctctggggtggctggcctcctactagagactgcagtaagctactcaccccaaacccctcctcctgctcacccctggccaagcggctagacctcagctccctggaagccctgcccccgcgctcctggcagcccctgcaggcacttctgcatgcaaaggcaatactgagatcagtgtgcctcccagggcaacttcacgtttgtaaagaggcaagatctcgaagaagattcagttatgggaaatgtcttataccatgataaaaatgcccagatttttccctgagccgtccattttctaaactctacaccaaaaatacatccccatatcattctaaaactactcgccctcaaaaaaaagaaagcaaggaggaaaaaaaaattgcaaaaatgttcccagtggggcaaatggaaatgacctaaatgcataattgggaatgctctgcagcccttgagaagactagagacacgggtctgtagaaatgcattaagtaataaatccaaagaacatgtacgccatgatcacaccgtgtaaaaaagttcataagttaacatgaaagtctgcaagaaaatctcgaacaatcaacaccaagtctttaaagtcctgacttgatttcacagtcatactcctttttcaaatatcaaaagtattcttttaaagcaacaacaatcatttattttgctcttgaatctgcaatgggggcaggggttggcaaacagaagcattttttaaaacttcattttcacttaaagcctagcttgactgaatgctgtaattgaaatagaaatatttttcttttaaattttcttcaaaaactgctatccaccagaccttaaggacaactgcttcctgaagttttctataactcagattatattaaaaataattcaacatgaaacccaaaacacaagcaacagaagaaaaaataggtcaaatgaacttcatcagaatctaaaacttctgtgcttcaaagggcactatcaagaaagtgaaagacaatccacaggatgggagaaaatacttgcaaatcattaatctgataaaggacctgtatccaggaactcttaaaataataatttaaaaagcaatttaaaaatggacaaaaatggtcaatatcattagccaggaatgaaatgcaaatgaaaactataacgagataccacttcacacccaaaaggcagacaataacaagtgttgctgaggatgtgagaaaactagacctcatacgctgctggtgggaaggcagaatgagtgaagtcactcagtcgtgtccgactctttgtgatcccatggacggtagcctaccaggctcctcttcccataggattttccaggcaagagtactggagtgggttgccatttccttctccaggagaccttcccaacccaggggtcgaacccaggtctcccacattgtaggcagacgctttaccatctgagccaccagggaagggaaggcagaatggtgcaatgataatgaaaacaatctgtggttccccaaaaaggtaaacgcagagttaccatcagttcagttcagttcagttcagttcagttcagttcagttcagttcagttcagctgttgtgtcgactctgcgaccctatggcctgcagtactcataggtatgtactcaagagaaataaaacaaatccacacaaaaacttgtacatgaatagcatagtattaatcataatagccaaaacatggaaacagcacaatgtgcatcagctgatgaataactaataaaaatgtggcctctccatacaatggaagattaatcagtcacaggaaagaatgaagttctgatacatgcaactacatggatgaacctcaaaaacatgataatttaaggaagccacacacaaaaggccatacattataccatttatatgaaatgttcaaaataggcaaatccacagagacagaaagtaaatttgtgttccaaggaatggggagtgactgctaatgggtacaggtttctttttgtgtgtgtatgtgggggaaggtatatgacaaaaatactccagaattagtggtgatgattgcatgatttagtgtctatactaaaaacaactgaactgtacacattaaaaacgtgagctttactgtatgtgaattataactaaataatctagacatatttttattgacacacacacacacacacacacacacacacacacacacactcggcctgagaattagcaatgagaccctaatttatacatgccacaaatgatctccttgtcccttcagcagtatccttttcaataagccagttacacacacaataaatactccgtcaggattacaagatcatgtgctggcaacaatgcaggttaacgacggtacacactcatctgaacgggaagctggttaagtaggttactggcagcaaagaaaatgaactatgttttcaacagatacctcaaaactaaagagaaaaagagagcattgaatgccagccctttcctttttataacactgttttccaacttttcaatcctgcacttttatcttgcactatcaattgtttacagatagtgtagaggagccttttctctggtctctctctccatgctggcttccaaagctgattattacaataaaccaatggggagtcaaatccaagcatggagaatatatatctccaacagaaatgtttgcatggattaaagctagaccctttttatcggtcatggacctaactgcctccatttgcacacataacaaaacccatttctttctttattacttttattatataggattttgagcatggcattcaaagagctctccaacctcacatacctatctgcttgtcccaattataaccctacaggtcagcacccccaaacctatcaggcatttactgtcctgcctttgctcaggcccttatctttcactaggagttccctccccacatcttgagagctatgaaaatccgagttatctaaaggcccacttttgccatgtccctcacaacctaatctttctcttcattttcataatcattccacttctattacagctctcattcccttacagtttcctaattacactgtcaaccccctgggagtggcacacaacacctaatgccacgcattcactggccctttttggggtctgcaacatctagcacaaagctttccacatgctgaggcaccaaatgaatgctaaattgagaacaatgagtaaactacttcctccttctttcttgctattctattcttatttttctatttgtactttccgtacttacagttttttgtttctctattcagttcttcccccattctgtttttgaggtctattaaaatatgtgggagaggacaaaaaaaattgattcttacttgaaactcaaatgagaaaaccactttaaaataagtactctggaatgcaacaggaaatgctgaagacccacattcctgttaacaagctgccgaagggatgctaggtttataaacggcttcctcaaattctcaggttttcaaatctgaaaccccttgactaactctcatttccaaaaatttaaactgaatttatcactcctgatttaaatttaggaacagatctttttttttttttccttcttttcaaaatcacatgtttcttttgcactcactcttaaatgtcccagttagaggcacgccactttatttcatatcacagcttgagaaactgaggctcaaagaaactaaccaaggccacgaaagcatggttaatccctccatcgtttctattttcacctaggctgtatttatttccgtatctcttaatacaggtgtgtctcgcttaacagcctcttaactccactcttttatttccagtcttcctgggtgtcttgctgaacaaggcatgtcaaggaagtcattaagtataataatgggcactatctctacagcaagaagtggagcataacaaaacgaattaagcaaatagcataggcacagaccaacttgggaggcacaacttgccacgtgaaaacacgttatctaggtggccactgagcactgcctcagagacagctagagaaggaaaaactgcacaaatcaaagcacgctctatcaccaagtcagagcagctcatcctacttaaagaagttgttctgtgagtgctcttttatgaagagcaggcatctaactgaactgttaagaaatataaactctcagttttgcttaaaacaaggcacctttgtagttagatatactaactaatcactaacagtggtggagtgaatgggtagggagaagagaggagaaaaaaatagatttggttaaggaactcaattttcttaaattatcctgaaaatagagagcagtgtgctccaacacaactttctgtgatgaaggaaatgttcttatgtccaatatagtagtcacaaatcacatgcagctactgagcacttgaaatgtggctggtccaactgaggaagtgaagtgttaatctcatttcaattcggttacatttaagttgctacatgagtactgcattggaaagtacaggcatggagtgtgcttaactgagagtgcatgaaagagctgcagggggaaaatgcaccttctagaatcataggtgagacaagggtgagtgaatggatggaactgtgcttgagccttcctctggaaagagtgaaaaaggtttcatcagattcttaatggagtatgcacctcaagaaatgatcaattaaaaatatttttttaaaaaaagcaacgatcaatacgcatctgcaacatctgtacatttcatgtgattaatgtgtttagttcataagaccctcaagatttttacctttacttgccattactgtttcgaggttctatcccttacccataagacttcattaatattacacttggaccatgaactgtgacagttcaatcaagagacttagtcacaggaaactgctaatcctgtgaggagaacattttgttcttcgttttatttaatgaagtcctcaaaaggaacaagcataaatttacctgtaatgaagacacctgaaaatggcacttgaaatgcttgacagaaaagagtggggatagttttaaggctgcactttgggggacaaaattaaaatgcaaaaaaatgaataaaagtcataaaataggaatactacactaggaagcagagcagggtatttcaggaagaagactgtgttgtgaaagaaatgaatgtgaacgtgcaagttagaaaaatacattaagagcaacaaaacacaaactgaacacgatctgcgatgatctgctgtaacttaagggaaccctggttctgactcgtctcttcaagttaggaaagaaacctgcttgctatctttaatttgaagcagaaaggggtgagggctggagaaacttccatgtaagctcagggaagagtcagtatagcaacactccccacaaggcatgaggccacagcaaggcagaacttcttggctgttacagaaattaagtaagaggggtggaatttcccaagaagatctatttcaagagaacagctgtatatccggcatataggactgaactagattagagactcccattctgctgggaaaccgtcaccaggtcaaaacgagaagaaacgtcagagcgctgcagggagctttctggaaagttcgcttcatcacacgtctccatcgctgatgctgcagtttgtccccaccaaggtggggagctgacttggcttacaaaagccttcccgagcccagacttactccgtcatcatgacacatttcgctctgtgcctgatcaactctgcacctgctcactgaatggaggttctcaacctctctatccccagagcgtcagcagaagtcagaggagacttcccaaaggccaatccaagggcttctcctcagtgctcatctaaaccccctaaggcgcacgcagccctaaagcgaatgaagaaaaaagtgccccctgaggactttgctgtgtacacttctacaaacacatcctcatggctgaccagtgtcttcagcagaggcccacccaatggacagtgaattctaagatggagcaatttgtctgaatgtattacctggcatcaaatctcaaaggggtacccttctgagggtatttttttaaaaacaagtaagataatggaggcccaaatgggaaagggtcttgcaagtatcacacctctaactagaggcatcagtgggaccttgaagtcttagccaggactcagtcaccagtactgtctctgttaggtctaacggcctggcaatgaccttgaaaatgcttcctacttcatcatccataaagctatcctgcttctctgcccctcaccccattagctttctgcaacccaaatagctcccttttctaggaggctcttagaccatatatatcatcaggttgatgcccttgctgttgttcagtcactaagtcatgtcagactctgcgacccaaggactgcagcctgccaggcttccctgtccttccctctctcccagagtttgctcactcatgtccactgtgtcaataatgcctttacctcttcccaaaccatatcttcctgggatataaaaacctagtgattcctaaagtccacctccacccttctgccccttgggcgccagataagaattccaaccccttttataatacagtcatctgatgtattcagatggcagttcaaattcaacagatctaaaaaccaagttaattattttccccattttcaaaatctcttgtcttacccacttcacccacacaagaaacgtgtccagttcactccctacctactgccactatctttgctcaaataacaaatgctatgactacaataacatcagccaccactgttccctgagtgtctactaggtacctggcacagagcaccttgaagtcacctgcaacgcagatgctaccacccgtgctttatgggtcaataaaccaagttcataaagattgaataacttccccctggtataattgaacagggcaggtcaaacatgtgtgaccttcactcccatcaaaagaaaagaagtcaaaaaaatatacaaagccaaaaaagacaagagaacaactgtaggtgagagacagcaacaaaaccaggaagatgggaagtaaatggtccagcagtgacaagctgaagagccagggaacctacctggggagaaacagctgttaaggagaaattggccccgagggcacggggcacttctcagcacagaggcagacaggccggctgggtggaaagcacaaggggagaccccatgacaccccctcggaacccaggggcctctccctaccagcagacctacttcctaataaactgtttgcagccggagttggggatggaactctccagatgatgagggaggggacagcaagcgacagtgcgtgcagggaactgggcagggcaggttatatgacatttcagaaggcatcacagaggtgctggcaggacgcttcacaaccagtgctcaaaagggagttcatgagttcatggtagatcacaccacattcctttctatgacatcgtatctttgggaggcggggttccctggggctagtatgataaaaatcaggtgctgcacaaatattaatgcgaaacagggtatgagggtagcagctgtttgttcccaaacattctgcaatgttactgaagagtactggagctcgttctagaaatgctttgtattcaccaacgcatggccttccagcagctcttctgttctgactccaatgaaaccagatgtatgttcaggtgtgtccacctagtccctgctctgattacacaccccagcgcaagactgcgcccacgagagcagtcgcctagccgcatgccgcagtccagggagttctgatatgtgcgaacctgttaaagcagttaaatcctccattatctgtgatatgcttctacagagcaagtgccaggaagagaaatctgtaaggcgctttttcagacttctccaacactgacaaacacagcccctctcacaagagcgaaccttctggaaatgaccttagcctctgttccctcaaaaccgagcccagttcacaagaacctgggataaaaacggttcagcccacactgacccagcagtcagttcactggctgccgtgatctgctctccttcactcctggataatgaatgtagccacaggatgaatgtagcaatctgttccatactgtttctccatccccctctaacaatagcagacattgggaaggcatcaggccatggacacaagtggggcctgtgttctgagtccctgcactgaaacgagcaggttgagggcagccggtctggtgaacccccacggcctgcctcgctccgttctgtatttcttcccagacacggggctggctctccccggcccacgctgatctagctgcgacctcacctgcagtcgctcactgctcgtcatcctctctatgtttgtgataagcaccagcatgccctactctgcacccggcatggtcaaaaattaacagaaggtaatggaggaaccgaggatgagcaaacacccggagctcaccttcacaacacgtgcaatgccaagagtcacgctggggaagttctctccagagcagaggcacccccagactccctggcaagctccagcctcccctccccaacccacggcaaccaggcccccctcacctacacacctgggttccccagctctcctccctcgggaactttgacctttcatctgcatcacagctctccaaacgccctgaggccttttgtgagttcaccaccctgctcaaaaaaaaattcttaatacatgttctgttgatgatctacttagtcacaggctctattttcttttccttggttttgattaacaaatttattaccgagctacctttcaagtgagacctgtttctcacacacacagacacacacacacttttccatttggcttatttccttctgttgcttcaccagcttgcctgaggcagaactccaggcagccctccttttactgcgcttcacagttattaggggctttttacaaactgaaagtttctggcaaactctgcatgaagcaagtttatgagcgccattttccaacagtatttgctcactgcttgtctctgcgtcacgttttcataattcttgcattattttaaacttgttcattattattatatttgtaaccatgatctgtgatcagtgatatcagcagtgcaaaaagattacaactcactgaaggctcagacaatggccaacaattttcagccacgaattattttttaattaaagtgtgtatgttttttttaggcgtaacacacaggtatggtataaacatcttgtaactttcgtaaacagtggtaaaccaaaacctttggtctgaaaccaaatccaaaatatctccgaggtatatctgtacttggaagccaataagttgatgtctttacttggtgtcatagatccacacaggcattacaaaatacaaccagctcaattttacaaagaaagaaatgtggtgacctaacttggccagagcagcaaaccagtgcacatggagcaagactccccagagcagggggtgctcctcctgcaccagtttctcttgatactccccaggataaaacccctccagtagtaacagagcacacatccctttggtagactgaacttgatagcaatcatttttaggtgtataatacagcatcccctctaccccacagcagacagctcctgatacaaggcagagaaatctattcattggcaatgaacacactcagtgtccatcagcataaggcaaaaagcaaagctcctcacaaaagatgccatgttgcccgaatgaataacactctcacagcaattcctaaatagagccaatcttttttttttttttttttctggccacgctgcagagctttcaggatctcagtttccccaaccagcaactgaacccaggccacggcagtgaaggccccaagtcctaatcactacaccaccagggaacttccagggccaagcctttgggactcctctcactcacaaagttcacctaggagttacatctgccaccagaatgaagcagtacatggactgaaggggctagttttaggcatgacaaaaacatgccggaaaaagtcagaaaaaaaatgcaaaaatcaattaaaatttttcattgcttatttcttgaattaattgatataatccatgcagaactattgtccactgaagctaatttaaggaagaattttatgctcaacaagaatggcttctcaatttgtttcttgtaaatattcacaagtgttcaatttacaaagctatcaaaaccacatcaaccagagcttgggattaacatatacacactgctatatataaaagagatcatcaacaaggtccaactgagtagcacagaggattctactcaatattctgtaataacttatatgggaaatgaatgtgaaaaagaatcaatatgtatatatgtataactgagtccctatgctacacactggaaactaacacaacattgtaaaccaactatgtggtagctgctcagtcgtgtctgactctttgcgaccccgtggactgtagcctgccaggctcctctgtccatggaattctccaggcaagaataccggagtgagttgccatgacctcctccaataaaattggaaacaaaaagaaaaatgcatcaacctttccccatttcacctaagtccacacacagtaaataccatgaaacaggtacctatgagctggtttgcaaatgttttgtttaacaacacctggcccacgactttgtgggaggacaaagttagatcctgatctcatgactgtgatcagactgtatgctttgggaagggggggactccccactgcccttggtatcactagcacctttttgtcagcaaccaaagactactcagaaaatgtttgctgacaattcgaataatactgaaaccaaatttcctaagtcagcttcaagggccctgaatgcccctcaagttctttccaacacttttgccaacgaaatagaaacggggagcggggagagatttctgttatcagaacatttttggtcactcttattctttcaaataaatgaatatatctcttagtcaagggaaatctcttcaagttcccaagtccaagaggttcctaaacaagaaccaacagcactgactgtgagctctggagttacatggactgacatcaagcgggatttctcaaccccagcacaagcaacattctgggctgggcaactctctgtgaggagctgtgctgtgcattgtaggatgttgagcagcacccctggtctttactcaatagatgcctgcagcactctctcacatgtgtgaaccaaaaaggctgcagaggttgtcaaatgccaacccctactggcactctaaattcacaggggcctactcggaatcctggctcttatcttcagtcctccagagaaccacaggctagatggaagaagtggcggaggaagaaagaaatggaaagaggagagcttggacaagagcaaacagcactgaagtatttccttagtctccaagaactcggccaggcgtcaaggccaacagtattctacttagttttcctcggtctattcaaaccttacaaatgacaacccaaaaatctctccaactcacaaaactctccaaagtaaataagtcagcaagccagaagctttttagtataaactagaggaatttactattaatacaatatccacacacaaaaaaacctgaagagaccagacggccacaccagatgcagagtttgagacaagtagtgaaggtaacttcaacccaaggttctaaaacagaaacgaaaaacagtctccttaaaggtccgtggcgtaagagtactgagcttccttcatgagttttgttccactgaaaagtttctgagattacaggcaatttagggattatccactacaattatgatagcagagaaagacaagcacgaaaaataatttttcattaattttttaaaaagcaaccaaaatctatttttatgaggccaccaaaatcctacataaagagcgtgttcacgtgacgatttggaaactacccgaagtcattcctcaaaagaaccctggtcacgggatgtatcatcacttgaaaaaaaaaaaacacccaaaacccaactgatactcttcgacttaaattaattcaatcggcacttaaaattttcatcttctctctttaagaaacgaagttggaagaacgagaagaacaccattcggaaaccttggccagagtctgcatccgataacggcccaaaccgcctccagcccctaggattagttttatatttcccccctcgtctccaaagtggtactaacacctcagcaaacgttcacctgggaagcaggtcagaagtcgccagtatcaaatcgtgcgcgcctctgccttctgtgagtcacatcagagtgggttgcttcggggtgcctgggtgggtttctccgtgtacgcgtgtttccctgcgggtaacatatgcccttctctccccctaggggtttgtgtggctgtgtccctctccctgatcccagctgctaatggatctctttccccgtgtgcgtctccaggacttctaggtgtctgtcttggggcgtgtatctctctccccgggtgtgtaggtgtgggaccccgtctttccacctgcgtcagacactgtaggaggcaaggggctacaagtcgtcccttctgctgcgggggggagagcggaaaagtgacccgcaatggccgcgcgcgccccccgccccagtgcccgaagcccaggccgcactcgccgtcggcgggctccgctcagaccctgacgccggcgcagctggccccaacccccgcccggccccgaggggagtcggcgccccgctcacctcacggccacacggaataagttcgggagctccgggccggtccgtccgagggcaggggaaaaaaagtgaagagggtcgaggcgccagcgggcaggagacttcggtggcacggcgagggtcagtctgcggttgcacccgtcctgcacggagggaacaacatggcgacgggccggggcggggcccggggaaagcgggcgggacctactcggcggggcggggcccggggtggccggagccctgggaaggtggggaggggcctggtcggcaggagccctgggaagtcggggcggggcctgattaggggctcggggcgcggggcctcgaggtcgcctccgccctgccctcacccactccttgccaatcccctctagctgaatcacaggcttcttcgggtgcgctatttctctagacctccggttgcgttcccgggaaaagacagcacggatactagttacctttaaaagctgacgtaaagtgggaataagcagaccgcaaaagcactgtcacacgatgctgtgactacgcggtgaaatgaatatgcaaataaacaagtgaacagattgaaaaatgaaaacatctgtgacattgtgaaataacaggatttcttgattagctttttttaatttccttgctcttgttaaaatttttactgcctctcgcctctaaatataaagcactagtaggaaaagatataaagaagcagtgagaaaaggcggttctgaaactcttaattcctcacttgaaatacggagttaagtgcaggttgatattgtagaccagagagggatttttagtccctctataaatatattttgtagggcagatttagtttctttattttccaagaaaagatctcacctttattgtttcctgggcccacaatcattaatctctggctctttcagttcagttaagttcaatcactcagtcgtgtccgactctttgtgaccccatgaatagcagcatgccaggcctccatgtccatcaccaactcctggagtttactcaaactcatgtccattgagtcggtgatgccatccagccatctcatcctctgtaatccccttctcctcctgcccccaatctctcccagcatcagagtcttttccaatgagtcaactcttcacatcaggtggccgaagttttggagtttcaacttcagcctcagtccttccaaagaacacccagggctgatctcctttaaaatggactggttggatccccttgcaatccaagggactctcaagagtcttctccaacaccacagttcaaaagcatcaattcttcggcactcagctttcttcacagtccaactctcacatctttccatccactggaaaaaccagagccttgactagacggacctttgttgtcaaagtaatgtctctgcttttgaatatgttatctaggttggtcataacttttcttccaaggagtaagcgtcttttaatttcgtggctgcaatcatcatctgcagtgattttggagccccccaaaataaagtctgacactgtttccccatctatttgccatgaagtgatgggaccggatgccatgatcttcattttctgaatgttgagctttaagccaactttttcactctcctctttcactttcatcaagaggctcttttgttcctcttcactttctggctctttaggaagtcaattttgggtaaggaagctaatgtaattattcagtactagaatagttccatttgagagagtttgtcacaagcataaaaggcaattttagaatccttgtgaaagtgaggcatgtgactgaattctagtttaagcttaaatgaatttttctttcatagaaaacaatcatatccatgcagggtatttccccaagcaaatataagtaaaggtttataaaatgcaaatctactgataatagggaggatgaagagattcattagcttattttaaaacacataattaaaactacacaacaaaacatgtaagaactttaatctttcaaaaatacaccaaaatagatagtgttagatccagtggactaaattgcaacaaggaagccatgggtcactaaggaaatgctatctgaaacattctagatctatctcataatcatagacaaggagtgatgcagtaagggtttatcgtcgtaatcgctaataccaaccagctattaacaggtgcacttatgaaattactgtatcttgacttaaagaaagccttgagaaatctaagaattttcaagaaagggtcctaagaaggtcctacaagtgattcataggctgtttcaaaatgtgagtgagccatataaacatatctagttgtagccacagtcagcagcagaagaaagaacacggtggtggtgctttagtcgctcagtcgtgtctgactcttgcgaccgcatggattgtagcccaccaggctcctctgttcatgggattccctaagcaagagtactggagtggcctgccatttccttctccagaggatcttcctgacccaggaatcaaacccaggtctcctgcattgcaggcagattctttaccaactaagctatgagggaaagaaagaaagaatatggaaagaaagaaagaatatggaaaggtacttttactgaaataactcttacttggtcgctagccaactgacacttaagaatacttgtatattctggtctcttccaccatccacttctttacctaattgatatgacaatgcgagagtaggctgagtggaaagatccttccctgaagggcaagtttggggatttttcctgtggattgtatagttggcaagctgacacaagttagataaatatggtctctattgctcttgcttcatgaacttgtttattaatgaaaaactttgaagaactgaccgagtttggctcccttcatctaattagggtttttgcctttatattctgtaaacatctagtgcatcactcaagacggaaaaagaggtcaagattgctgggcattaatcatgcctttccttaagtaacacctacttattactatgagtgctgggagttaatactccatttaaagctggagtctaaaagagatcacctctggtatctctgatgaaaagctgctgctgctgctgctgctaagtcgcttcagtcatgtctgactctgtgggaccacatagacggcagcccaccaggctcctctgtccctgggattctccaggcaagaacactggagtgggttgccattgccttctccaggtgaaaagctacaagtaagtaaatattataatatttattataatcaataaatattttatttattataatcaataagaaatagcgaccataattaaattgattgtggacttccctggaggtccagtggttaagaccctgtgctgccactgcaaggggtgtgtgggctggatccctggtcagggaacaaagatcctacaagcctcaaggcagagcaaaaacaataaaattgattatacttttcacagataaggaaaaacacagaactcaatggtaggcaatttgaccattaaaagacaaatctgaataatcagaccctggtggctcagtggtagagaatctgtctgcccatgcaggagatgcacgaggcctgggctccatccctggctggggaagatcccctggagaaagaaatgacatcccacttcaggattcttgcctgggaaatcccatgaacagaggagcctggcgggctacagtccatggggtcgcaaaagcgttggacacaacttagtgactcaacaagaaaaataatcagaaatgtggcccctcaagtactgagactacagcgggtagataagacactggaggaattcaggggtgtccccagacactctcccacatttttgcttctatcctccagctgtgtttatattatatcatatgaccctaccttgctgaatgaaatagattcagtctgtttcctaagagagctcagaagagtagaggagatattcagtaagtaagtacatggatgtacagttataaattggatgaagggccttgagggaaataaacaaggtgcagctggtgggaatacagggtgatgggaccagagaaggtgtgagtgaggaggtgattcatactgagccccaaagatggcagtgggcagggctggtgcaagttgaggggacggcagttcactaagaacctagcacattgctgcagccaataaaattataaataaagatgcaaactattacaaaatcttcagaattgatggaaaagctgaaattatatttgtttctctagtcataactagatctaatgtgctatcttaaaaataacaagtaggtgttgaatagggctgctctttctttaccacactgtaaacatggcataacccaggtaattacagaaggcagaataaaacaggcattaaccttcaggaatgaggtggggaatttgatccctttgctgatttcctgatgaatgtgagtcataaactgaacttcacctttaagggcagcagaaggaaaatcccaggcataccatggtatgtaaaaatatgtttgtgtgtgtttgtgtgggtctttgtacatatgagtgtttatttaaaaaaagaagaagaatggaaaggaagtaggaaaatcaaaacagttgaattgttatgggaatagaattttgggtaatttttactgaaattttgaatcccacattataatatgcttttgagcaataggtagaaataggtgaaaataggttgcaaagagtcagacatcactgagtgactgaagaacaaccggtggaaatcttttactgaagcaatactaggcaacctttagaaatctttgccttaggctacactggtaagagccagaccaaaatccagttatcttagcaactcattccttcagatagaagtccttccaaatccacagacacatctaaaactttgagctgctcctagaattcaggacagtaacatgaaagtgtggtcctcctacgtccccactgccgtacgtctgaacaccccatgcacatcagcagctttcttgacctttttggtacaagagctgagaccactgtcatgcttacataagcaatttctttcctctcatgtcactgtcatccacataggcatatcctctcatgtcatccacatgaacccaagctggttcaggcggctggccatagctgtagttagactcagcctaaactcaatccctgactggattaaagtgataaatccctcagcctatctgcctactggaggacagagggaactctcagtggtggaagatattaactagagcacttatttttcatttatgcataatgcccagcacacaacaaaaaaatagtagccatgccaagaagcagcaaagagtgactcataatcaagagaaaccaaaacaacaggggcttccatagtggtccagtggttaagaggctgccctgcaatgcaggggacactggttcgatccctggtccaggaagatcacacatggcatggagcaactaagctcacgccacaactactgaaactggcaagccctagagcctgtgctccgcaacatgggaagccaccgcaatgagaagccctcacactgctactagagaatagcctctgctcaccacaactggagaaagcccaagtgcagtaacaaagacccagcacagcgaaaaataactaaataaataaagttaaaacagcagcaacaacaatagaattgaatatgtcatgacaatttaaatgtatctcaggaatgtatgctcagggaagcctggcatgctgcagtccatggggtcacagagttggacacgactgagcaactgaactgaactgaacaggaatgcaagtgtggtttaacattaacagtgtgaaagaaggagaaaacatacaatcaattcaatagatgaagaaaataatacattcaattaacagacatttgtgataatctcagcaaaccagaaataaaaggcaagtttcttaacctcatgaagaatatctattgaaaacctatactgaatatcattcattcttaatagttaaaatctgtaagtatgtgctttaaagcaggaaaatggtaagtatgtctctttaatattgcactggaggtcctagcccacagtagtaaaagaaaaagcaagtatgatgactgcaaagggagaaaaaaaacagtattaaacacagatgatatgctgacaaaatccaaaggagactatagaaaatttaccaaagagtttaacaagttgtcttactgtagactgaaagtttgtatcccctcaaaatgcatatgttgaaatcctagcagccaatgtgatactctggccaatcacatactctctttgaaggtccgagtctccggcaagcaacacagagatgctgaacagttccgagttcattctggaacggaagttgtggcccctggtatccagtgaccacagataatgccagtggtgatgataccagtggcaggatctagtacgtcacaaagacagcatctgaattaagtcattcacaatctggattcctgtttttcttgtgcatgtgtgtgcaaccctatggactgtagtccaccaggctcctctgtccatgggattctccagacaagagtactggagtggcttgccatttcctcctccaggggatcttcctgacccggggatctaacctgcatctcctgtgtctcctgcattggcaggaggattctttatcaccgcgccatctgggaaggccccagcgtccaaactccatgctccatccttgcctctaagagctactcagtatctccccaagaaattccttttctaagttgatatctttatttgcaactaggaactctgaatggtacagagttagaatgtatcttatagattttcttgtgccagcttactatgattcatcatataaatgcagctaaatggaattatacctttcttgatatttttggattggcctcgcttaggcttagccatggcagtagtagaaaaagatgacccctccccaaatctccatggcttaccaaaatgaagatgtattcctcaccttcacatccattatgggtcagctggggctccaccccatgtcatcctgctggacccaaactgatgaacctgagctagtagagcagcctctgtctgatatattgcaggtctcagtggttgaaagaaaaaagaccaaactaatatccctgctagctcttagagctcccagccggaagtgacattcattgtttccacccatgtgcgatgcacattccttccaaagggaggggcactgcacgtcacgtggcgaatctgatctgagtggtgtggtgttctacaactggctcactgggagggtcaccaaatatttgaacagtaacacaatctaacagaactcttaccactcagggctttgttttattaaattgataagttttacagtgcataatagcaatgaaataaatttattttgaagaagttctttttctggaggttggctttgaaacctaaacaatagtaacatttgatctagtttattaaagttggatgcgggcttccaaagtgagaggtgga

SEQ ID NO: 138 - DNA, 118571 bp, Hippotragus equinus
  source 1..118571: mol_type = genomic DNA
agagttactgatggcgaagggacaggaggagggaggcagcagagctgaagggctgtcagcaacaggagatggaaggcaagctgcaactttgtgcctgatactgacagcacaggttccggttcctcactggattcaattgttcacatctttgaaagttcacatcttgaaggtctgtatgtaggggccttactgtactttggaaatagaaacatctggtacagctttttcaatggcaggatcgacataagatttgatcgacagacacaagattttcaatcttgtacaataataatgcatgttctagtgagtacaatgttgccagtggcttaggaatcccctgcacaaatactcaactgtgctatccacaaaaagatatgtattatcttcttcactaactgtggctgtaaacagaacctgggagagtcctacaatcagatctgtaggagacaaagacaaagaagccggacgcgtacagggtgcccaccaaggttgtggggtcctcacttttcttccctgtttgaggtatccatgctctcattcattttctgcttttgcattcgtgttcgagtagatgctaaaaaaaaggatgaagaaatgttaacagcactgatggtgtggggtaagttggtaaagggctacccaatttgttatgctcacaccaaactgatggagcccaggacctcacaagctgtggtttccaattttttaaatcatacctctatcagccagctttcccccaaaatatgtaccattaaagtatgtatgtatttttgtgtatgtgtataaattatacaacacatataccccaaacattaaaactcaatgagataaagataaataagcattctaatcttgtcttatgtacccccacaaggtgatcttacacacactcaagtgtgcccaactttgtagaccactactctagaggtgatgtggttaagtctggcatctgagcaaaacagaatcctgggctggtccagaatctgctggagtgagtgttattcttcatgaagttcagaattcccttgtgtttggagatgcactgcaagtactgcaaatacatcagctcacagctgattcattatttttttaaactaattgggctgcactgggtcttattgctgcgaggctttctgcagtgagcgggggctgctctagctgctctcactgcggtggcccccgtgtggcagtgcacaggctcgaggtgcctgggctgcaagttgcggtgctcggtctctagagcacgggctcagcagttgcggggcgcaggctttcttgctcctcagcatgtgggatcttctcagaccagggatcacacctccgtcccctgcattggcaggcagactcttaacggccagaccaccagggaagtccagcttacagctcatttaatttggacgtggacattttaaaatacattattaattacaacatagacaaaaacagaaagcttcttttaaataatttcaaagttcttaacttgattttagaggcgggcaagagttctttataaagaagcacagagaacattcacacttggtaaagggcagaaggagcggctctcagtctcctcttgtggcccctctgctctgagcaatccagcactgtgtgatggtctgtttctgagggaagttgaggagcaacctggagaattccctacccttatggcttaagactcctgccacttctcccattttctagctgtacgaaggccctgaacttcagcctggcagagggaattcagtcattgctaagtgtgtccgtgtgaaacggactgactacagcaactgagctcctctgtaagaaaatacacatatttttacatctttctactccttttaaaatgcatacttgtgggctccaaaaggcttccacatatttttaaggcctgattttggttataagcttcatgtctattttcatgcactggggaggaaaagctacaaaaaacagtagtatattaattgatgtaaaatccaaaaagagattcatttataagcaaagaacttaaacctgttacatttagtttcaatagtatcttcaaataatatacatagaaaaatggtttaaaatcaaaagtaattttaaaaactttgtatctcaaagttagtatatacagagatgtactgagagaaagcttctttttaaaaagtcacattttaattggtattgttcttatcaatatgtcctatgacctagggatgacagttttaattcttatctcttaaatatttgtcttctttccaagacctggctctgtttcctgttaatggatctggcaccagattatcaggaagtgtccccttttcctggtgacatttcatggctacctacttctctaagacagtccaataacagtctgtgctttcctggtggctcagtgttcaagaacccatctgccagtgcaggagacctgggttcgatcccttggttgggaagattccctggaagaggaaatggcaacccactccagtattcctgcctggagaattccgtggacagaggagcctggtaggctcaaagagtcagatatgacttggcaactaaacaactacaatttatgcatactgatatttttcccttttttttttttttaatgtggaccagttttagaagtctgtattgaatttgttattgtttctgttttatgttttggttttttggctgtgaggcatgtgggatcttagctcccacaccccctgcactggaaggtgccatctcagtcacgggaccaccagagcagtcccctgatctttttcttaacatcctttccatctaactctacttgggttaatccttcacaatctcagattagtttaggagagaatttcatttgccttaacattccaatagaaacagtgacagactttattttggggggctccaaaatcactgcagatggtggctgcagccatgaaattaaaagatgcttactccttggaagaaaagttatgaccaacctagacagcatattaaaaagcagagacattactttgccaacaaaggtccatctagtcaaagctatggtttttccagtggtcatgtgtggatgtgacagttggactataaagaaagctgagcactgaagaattgatgcttttgaactgtggtgttggagaagactcttgagagtcccttggattgcaaggagatccaaccagtccatcctaaaggaaatcagtcctgaatattcactggaaggacagatgctgaagctgaaactgcagtactttggccacctgatgtgaagacatggaaaagaccctgatgctgggaaagactgaaggtgggaggagaaggggacgacaaaggatgagatggttggatggcatcaccaacttgatggacatgagtttgagcaagctttgggagttggtgatggacagggaagcctggcgtgctgcagtccacggagtcacacaagagtcagacacgactgagtgacggaactgaactaacatctaacttggaaaatgatttagtattctttatcaaaattctgatttctagtaatggaaaacttttgtttgaaatccagttctaaaacttgcaaattaggaaagttcggtaataacagaataaaagattattctttaagtaagggtgatgatatttatatatgctaagtttctaacatcctccctatatccagcactcagagagttcctcattatagttctgctatcctaaaatattttctagccacagccatccgtaatgaagatgtggtttcacttcttggtcttcctgctgcacagtagatgttgggatgcatgaagatgacctgtactttgcatcatacatttaatccacagatacttgtaaataacatattgactgaattatattttaaatgcataaaagtctattaattaaagggattctataaatttatccttttataatgaaaaggctttctgcaatgtaaacaattgttcatttacttacttaaataagtacttactcatttctgccagtttctgttgaaatttggattcccctgggagatgtttactgcagatttaaaaattcaaaatatttcatatgcatgtgtataaatgaaaaactgaaatttccaaaaactatggcattttcaatgactatttatgctctttagtaaatagcttttattgtcaaaggattataaatcaaacatctaaaatacaaatgtcataaatttatgagcctagatattttatcagtggttcttataaaacagggtagcgtttttcaagagcattttaaaatctaatgttaatcaaaactaacaaaattatatccatggcattgtaaagcctgattagatttgtaaacatctgatatttttaatgaatttcagtagatttacgtggtgctttttaaactttgggatgcagtcacatcttttattttgagcaagcctcataatttccaaattattactggcatgagagagactggcagatgccaggaccagagcggccactctgggtttctcccgacgaccagctcagctcctgacacaggtgctaacactgtccctaccttccatctgcttcatcggatccttcgatgtcaaagcgcagttttttcagtggtttaggggggttgcttccttcagcacttcttttgagcgcacggtcgctgttacacaccatttgatttattttctggaacttctctgaagtctacaaattatggaattctttattttagatcattttgtagttagcaaccccatattgtaggttcgaggtgggtcaaaaatcaggcagaggtaatatctgcatttaacttcctgcttctttggaccaaacgggagatatgaaaaatgttaaaatcagactaactacacccaacttccctggtggctcagatagtaaaccctctgcctacaatgcgggagacctgggttcaatccctgggttgggaagatctcctggagaaggaaatggcaacccactccagtattcctgcctggaaaatcccatggacggaggagcctggtgggctacagtccaaggggttgcgaagagtcggacatgactgagtgacttcacttcactttacttcacatctaactctgccccaataaatacctgctcttctcacaccctcctatgtcttcccaacaactctgactactactccaaaagtcctggctcctcattttcagaatttactcaagcacaaaaccagggctatttctcagaagcatgcaaagctggaagagctttctggaaccttgttttctgttttgtttttttttaaagcacagcataactggagcaaatgttacaggaattcaataagaggtatctagtgaagaataattttggactcactttataaatatcatgctgataagtcatacagcttataaatttgaaatcatcattgatttgtagtatttgttgatattcctaactcttaaaggtttaaaataaaatattaagtatctgaaaaactcaaagtatttgagtccttccaagtactattagagataatttgatttatatatctcctgaggaagaatcctttcacagttaagaaaactttgggaaaaaatgctaaagagggcacaatacctcattttatccaaaggacaaacacatggaaacctgtgtcttatctatttcagaaccagagtgaggtgattatctccgtgatgtgtattaacatgttttttttggattctagaatgaaatcagactttccaatagaagttaaatctgatttgactgatttgacactgaggattagctttgctaattatgcaaagctaactttcattagctaatttaccaaaaattaaatgaactaagtttccaaaaattaaatgcaaaaccagattttgatggaaaatatatttagagcacatgtataatatgatagaaatgaaattctgtacacctgttaaatggatttccagttatgagctttaaaatatggaagtacgtataaccttctttcaactctttcagagtttatcgcaagcaaaacggtttgaagaccactactctatatctgacttccctggtggctcagatggtaaagcatctgcctacaatgcgggagacccgggttcgatccctgggtcacgaagatcccctggagaaggaatcccactccagtactcttgcctggaaaatcccatggacggaggagtgtagtaggctacagtccatggggtctcaaagagctggacgcgactgagcaactttactttctttctttcactctatacttaatctggatccaatcctatttatgtggtccacatcacctttgtgaagcctgacagctgtagcctgtgttgagctaaatgtcatcgcatttactatttgtaacaaacgtgttaacatttggtcttttagtatacaacatgtatctctctctagttatttcattggaggagcagtgcctaggcagaggctaaaatggctctcgctaattgtctccttgaatgtggggctgaacctagtgttgtcctgcttctgataaaataaggcagcaaaagtgatggcaagtcacttccattatgacaagaagactgacttcaattttgcttcttatctccctcttcccctccctcctctctgttgtgagtagccagccacccgagggagaagcccgggtgtcaaggaagtgattatggcttgagccaacagccatcgaggatcggccaacagccatacaagtgagtctgagtgaggaaggtggtcctccgggtgaacctggagataactgcagatccagctgaaatgctgactgcagcctcgtacagacagaccctggacccggctaagccaggcctgctcaatgacccacaaggaatgagatttccaaaggtttaaatgcctaagtctgggggtggtttgttatgtagcaataaataacaaatataggtgggggtggtgggatgaaacattcagtaatgctcactgaatataggactgtggattagtgatggtaaggaaaggccagctagagtagtgggctcccagactagaataaccatttcaaagcttaactttcccctggattcctctgcaaagaagaccaccacatagcttgtcacttacactggggcatgtaaccaattcctaattaatttaccagggaagaatatcctagaagttggagaggaaggaaaggcaaaagtgtgtatatgtatagaaggagacaagtgggcacggtggctacattttggagtattttaaatcatactcccaattagtgaaattcaaagctgttttttaaaacattcctttgagactatataatgcacatacatatttgtatatatatacattaatgtatacacacatataatctcaaaggtgtttagaaagcagttttgaaatataccaattaaaattaaacctgatttgaaaataaatctgatatatatcttctaaattttacgcaacatgcttgaatgaggtacttgaatagtagcatttataaattcaattacagagaatttcaaattcttttataattatggtatcatgctatagtaattcacagaaaaaatacttaccccaaatgattcaccgattgatactaagattctgtcaagttaatataaaatacaaattagtaatgcaaatcatatccaactatgcagagatgaacatacacgcgtcattctgaactcacaggaagaccagatcacaggtttcttctacccctagaaccactgatgaattatacttattaaaggctaattttggtagtgctagtctagtcacacactaagctcattccttagatttttaaagcaagaactgcatgtctacaagaatatattttgccattgctcacaaggaaagagggtaaagaaaattttaagtttactcatacttaattcttcataaatcaatgagtaaggaaacaattcaaaattatttcacattttctcattaaaaattcaagttctatttggtaaaactgtataaatgataatctgaattctatttaggatctatactgatagatggtaaagcttatttaacatctgggcttcccaggtgtctctatgacaaagaatccatctgccaatgcaggagacgcgggttcgatccctcatcccagggatcttctggagaaggaaacggcaatccactataggatacttgtctgggaaatcccatggacagaggagcctggtgagctatagtccatggcatcacaaaacagtcggacatgacttagcaactaaaacatttaacacatatcctagaatcagaaatctcttaatttgtccctgtttgaatcatataatttatgcatttgataataaggctgaggaacattagcctgatatgacaaagatttgatcatatgtacatggaatcaatagatatatggattttattgtcctccaattctttgataagtagccatcattctatatgatttaccaaaatatggtgaatacagagagtgttaagatgctctcttaatagctgatcaggattttcagaatgtgacttttttgctaaaggactccaacccagaagtgaattaactaatatcagcaagtagctatcattatcagcataatatgggttaattatcatcattaaaaatttacctaagtatacattttcctgtagcaatgtataaattagacatgctatgcacctcagcagcttagaatgtaaattgtagatatcagtacatagatacgcaaccataaaaacactaaatatatggaaaataacacagggcacatgagagcacttatatcatttgccagttattttctactttttcttttactgaaaatttttatgagtgtgcattgcttatgtaagcaaacacactacactaatgttttcataggattaatatagcccttcttcttgtttatttttcttgcccattaagtgcaactatatgggctaacaatttctgagatgagactacattaactttactaattaatctgcctccactattcaaataaagtcagtttcaaatagcccatgatagcatataataagtcagctgaagtacttcaaagccagagagcccccagtgttgaatgcggaagataacataatgatttgtaggtgcacagagcctttcatctaagaatttaaaacagcttcacactcatcatttacctgagccacagcagccttctgaagcagagacctgcccaaggtaatacaaggaggccgcaggcagaagtagggatggacttctaaagacttcatttaccatcatctacatttaatcagtcatctacattttcataagcaagatgaacagatccacagaaagagttcacaggacattcaataaattctagaataaaaactcttagcaaaaggaatctactttgtttagcagggtggtgacttaaaaaactctgagagtgatctgaaacttaggctcaaactagtactcagattgtttacaaaagacccaagaagccaggaaagttgatgactaaatttgcaaacccgtctaagtaaacagattatctcgcccccaacacccccgatttttatttttatcacagcacttaatataaattaggaaattagggactagctaaataaagaaagctttatggttttatgcttggattaaaaaagaaaaaaaaaaaaaaccctctcattctttactgctttcctaaaaagaaaacacaaaccttgatcttggagtcatttttgttggtgtaggcagaccttctgaaattttatatgggttctttaggggtgatatatagatgttccccccaggaatccgtaaaggtgaactagaaaacttgtaagggcttcgaggaatgtgaggaatcggtgacaaggtagggggctacagcaaaaacaaaagcaggaggttacttaacactttagtgagatccactgctttataagcagatttgcccaaataaaggatgccttcaacataccctggtggaagcatactgcagaatatttgttttcagtctctgcatgaagactgaattatagaatacgataatggaatcatactcctcttctctgatcaaaacacgtttgaatgtctgaggaagaagagcaaaaatacttgttaaatgaatttgggaatttatctctttagagtttctattttaatagttcatgatactttttaacagtaaaaagacgcattattttataggaaaaaacaatctaaagaagccattttaggcttggattatagctgttctactggaagtaaaaagtcatacatatatactgtatgtgttttatgtatatatatatatatatatatatatgtttattacaaatattctgcttattggcataacacagtgttccctatttattttataatatgaatttgaatattaaagtgttagctccccaattggagaaggaagtatcaacccactccagtgttcttgcctggagaatcccagggatgggggagcctggtgggctgccgtctatggggtcgcacagagtcggacacaactgaagtgacttagcagcagcagcagcagcagcagcttcccaattacattttaactacaaataattaactaataatatgaaaataaaaagtggatatgtaaatttatacaaatcagtcagaacatatggtacaattaatgactaaagttatccatatttttgaaaatccttatcatggaaaactacctacctcctgaacagcatgaggaagatctttgtacgctgtgacaatgattttgaatttaagatctatattcttcactttgcatatgccatacatggaacacatcataatctagtaaataaatttgatacaaaagcagtcagggttttgttacatggttgtgctcagagaatgagacggctggatggcatcaccaactcaatggatatgacgagtctgagtgaactctgggagttgctgatggacagggaggcctggcgtgctgcagtccatggggtggcaaagagttggatacgactgagcgactgaactgaactgtggtctaaaacacactgttatctttctttcagttaaaaaaaaaaaaaaaaaaaaggaaatttaatctcccacagaattatcttttcctgtcctgagctcatttggcactgttttagatcaactattcttacgtctcatgctttttccacactaaatgaattctagtttacaacaacacagaaaacgcctatgataaagtttcttcagtggtttctgcaacaagagctttcatgtcatgaaataagtaaatactgaaatattctcaaactctaaagctctcatttgtaaaaaaaatacagcaaaaatataaagggtagccagcaagcaaatatatgttaactaaattgttgcagcttctcgtttgaatccaaacttttcttaagaaatcagtacatagctaacaagtaagcagaagagaagagaagtgcataatttccttacctggtccaaatgcctgtctctcatgagttcatactcattttgcagtgtgtgctggaaaagggtccagatgatatgctctagttctgggtggtcagacagaaggcgtgcacacagggtgttcagtcgaagatatgctagtcgatacactggaaaaataaggggaattaatcatatttactcttaattttgcataacaggtagatattttcaaaatattaaactgttataatgaaatgctgttaaatagcatttaacattaacttcatttctcccactattttccttatgatttctagtcttaggactgttctacatacatagaaggcaaaacaatactttgctgaaaatactactcagcaaaaataatccttttgctgaattattatagcataaagttgaggcagaagtgaaaatcagaggaagaaagatcctaagatattgtgaaattagacaacccaaatactgtttgtttcagtttcattggtaatcactcatcacagatgttgaatattttatcaatattcaagagagtaattatttttaaaataacagaatttctgaactcccttaattttttcgatcctgaaaacaaaaaacaaatggtgtatttctctataaaaatgctagacttgtagattacctaagtggtaatatgactgtgatattaaatatattgagcaagtttatttaaaaatactactggaacatgggttggagaaaagtaatccacaaaactgaattttcctccatctggtttaaatgcacctgtcaaagacttgcataaagtaatcagaattttttagttaataatttatcccactggtcttcaactttggcttacatcagacttgcactgaggacttgttaaaacaaggattttttcctcatcctactagtctctgattgagtagttctagcattaggggctcaaacaaaaattctcctttctgcaacttattgagtaaggtggattctgctggttggggaccacactttggaaccactgctttaattcaaggacttataacatgcctataaagctcagtatatttgctttattcaagtcagaaataagatttatcacagaggaatctggccttctacctttcttcaaagagtttcaagtgggtgtgcacttgcatgtacatgcacagacacccaaatgacctccccaccccatcacacacacacaatcagaaaatgctgtacaacctggtcaccaggaaatgcatctgcattaggccacagcccattgtataatctcaacatacacatctcaacagaggaagtaatgttaggggcaaatatttctgagcataaatttgaaagcataacagtaagcagcaacaataacaacatctgacactttttgagtgctagacactcttggaagcatttcatgtattcattcacttaattatctcaaaacccaaataaggtaggttattattatttccattttacggatgaggaaactgaggcatagagcttttaaagtgacttgcccaaagtcatacctagtaagccgaagagcaaagatttgaatccagtcagcctcgtttcagagtccacgatcttcaaagtaatcatttactaaccttttttgtagaagagtgaaagggaggtagatttcaatggcttctgagtctggaaggctgaggttgcttgtgcctctgaatttggaatagaatttgcacgtggagttgacccttttttctttggggatcttacaggagaaagatacctagatatattcaaaggaaaagtcttcatgtgaagttttctcagaatctctctctttcacagatacacaaacacacacagctgtacacatgcacccaaacacatcttgtctatttaatccactgttttacaccaaagtcctatttaaatacaagttggaaaagagagctcatgaggaaaactaggcttgctgttatcatttctaaccctattttaataaatggcctttcctagaaattactgccttattgaaaaaatagctatatatctttatatgtttgattttaataattaaagtgagattgagataataaaaatgactccagcttaaaagaacaagccattgatattaaaatatcaatttctctgattcttctcttaaaaatgtttcactgataactacggttcatttacataagattaagttacacacacatacatcttcctaaattatacagtacagaattatatgaattaatatttcaggtagcattctcaaggcaggtctacacccatatactaaacatgtaaggcacacatcgagacagaagtattagtgcacatgaactccagtttctgacctatcaccgctcggtgctgccctttatttcagagggtagtccaggcctaccttctaattctgttttagcatcagatggtaaaagaatccacccgcaatgtgggagacctgggttcgacccctgggttgggaagatccccgggaggagggcatggcaacccagtattcttgcctggagaaccccatggacagaggagtctggcaggctacagtccatggggtcgcaaagagtcagacatgactgagtgactcagtacagctgagaaataattctgagcagaaagtaggatttgtaccttactatggatgtttctactacatgtaatatattaactagaataccagaaaaagggaaccagtatcatgattttgtaagtacccgggtctagtctatcaccctcgaatttcccttcaattcactagcaatactgtagactgacttaacttgggtagaagttagtctccttcaaattccaggtgaataataggtatcctgctggataacaggtaataattataatctaagcaggataatacttacttcgcttcctgaatctcagacttaagaaggccaaagtggagctcttcatttctccgtttttctaatctcaagaaatggctccgtattacaaccagtttcttaagtcagaaacttaggagatatttaaaattttttctttttcccaatcttcaaacccaatggaaaagaaagttctccctctagaaacatacccctgatattttccatttctttgtatctctactgacatatcttagaccaactcatttatttacatctctcatttggactattgaaattgtctccaaactgggtctttctactttcttccttgccctgttcttttctctcctcctacgccgtctgtacttcaaatggcagccagaaagtggccctttaaaaatacaaattatagcaagctgcccctctgcttacaaccttaatgttttcccacagccttttaaaatctgaactcctctctgtgagtctcctatctgatgagactctacaagacgtagccacagtctgcctttccagcctcttcttgtaccccgctctcctcttgtttgctttaggatttctttctgctcctaagaccaggtacgtttgatcacccagggacactgcacccactgtttgctctgcctggaatgcacaccacacagactgtggcaggccagcatccatttgttcttcaagtctcaggtcaagtatcatttcaatagagaaagcttccctgaacattctatcactttctcagctcctctctttcacttcattctgtttatttccattacagaacttattatactctaagatcaccttatatattacgtgatcaccttatgtatttccttgttcactgtttatttcctttcttcagcatgtaagttctgtgaagggaaggacctaatctatcttacttgcctctgtattcccagtgcctaaaacgcttcctggcacccaacagtcaactgcttattgaattaaagaaaaagataaggcttgacatatttatattaacgtattacctagcaagctaagttatacatgaaggcagaggttccacacactagaaatactctggatacaaatgagcatggaaatggcacctctggaaaacagcccctgcactcgtcacagagctttgtaatgtcaattcttacacagaactaaacagaaacataacattacacacattcctgtgaaaggcaatgtagctggaatgtttcagagcatgggctttggggtcagactgcttggatctgatttctgttggcttttggtaagttaccttatttctctaattcctttttcatagataatgaaggctgctacagtgtctattatcttacaggactgtttggtaattctccagcactgagtgataaataaaggttagtgattgcgttcttcttctaacacgtcatcaggcactcatcaaccattttagtctcctgttcgcactgggtactccctatgcccatcctatggtggttttagtcgctcaggcatgtccgactctttgtgaccccgtggactgtagcccggcagtctcctctgtccatggggtttcccaggcacgaatactggagtgggctgccagttccttctgcggggatctccccagcccatcctatgctgcactacgaaggcactgagctgcacttctggaagaatgtttcctgctttcctggctgttctactttgaggttcatgctctttctgtttccccggtcttctccctcctctctggtttccatgttgaaatcctagtctacctttgaggactatctaaatcgtcatccctgcatgaaaactgtcctcctgacactaaagtggagtgatttcagtagcactctgtaccgctccatatgacctttatttgggtcatgtatcttatattcctgattcttgaaagcaggaacaatgtcttatgcaaaattctattccctgcagcttctgcataacagcttgtatcacactatgctcagaatccttctgtgagctggatggacaacagatttcactcacatatctgctgcagtgtgattattctggagaggaaggttgagagtacaggcaggttcaaagtgatcaactggtccttctcggtcctttgcttgtttaataagatcaaataaaggtgaatcctacatgaaacaagatgacattagaacaacaccggtaagcgtgaccttcttatgtatgtatcaaaatcatattgtttgacatagtgagcattattaatatagtcgtaattgacaatggcaattctgaagtcagaataaggttcttgtttccattttgaaaatgattgccaatttctgtactatgcacaaaataaagaattaggactatgtataacttcaaatgcttaaagaaattaaaagttagagaaagagatacagaaaagacccaaagaaagtagaaggaagaaaaatagagatatgagcaggagttaatgaaactgaaaacaaagataaaatacatggtctgataaacaaagctagtaactgcttctttgaaagacctaataaaattaaacaaacctccagtcagactgagaaaggaagagacagataaataatattaggaacaaaaatggggccaccattacaaagatcagaaagataataggggacagttataaataattttatgtcaataaactggaaaatgtagaccaagtagaaaattccacaaaaataaaaattaacaaaactcaataagaaataaacctcaatagttctatcaagtattaaagaatttgaaacagtaattaaaagtctccccacaaagaaaacattcaagtacctctggttttaccagtaaattctaccaaacattcaaggaatagataattcaacttttacttcaactcttctgagaatggaaaaagaaagaacattctctctctgatttttgaggctagtacaacactgatactaaaaactgtcaaggacattacaaaaagaaaaattatagcccattctcacttataaacagagacataacaattctaaaattagcaatccaaatcagcagtgttaaaaaacagagtatgtcatttaccgagatgagtttatccaggttgcaagattagttcaatgttagaaaatctataatgcaattcaccttactaattaatctaaggggaaaaatactgtcaaaatcaatgcagaaaaagccctcatttaaaaacccatttattatgttaaaaaagaagaaaagtcttaataaatcaggaacagaagggtactcctaatttgataaatggcatctacaaataaacaaaaaacccacagcaaacatcatgtgtaatggtgaaacattaaaagcattccccttaaaaaatcggagataagagaaggatgtcccattatcacgctttctattcagtattatacttgaggttccagtcagttcaaatgacaaagaaaagaaattaaagatcaaaagaccaggaaggaaaaaagaataaaaacaccattatttgcaaatgatttatgtcaataaggtggctcagtggtaaagaatccgcctgccactgtggatacgggttcaatccctgggccaggaagatcccctggaggaggagatggcaacccactccagtattcttgcctggagaatcccatggacagaggagcctggcaggctacagtccatggggtcaggaaagaggaggatacaaccaagaaaactcaaaaggatctacagagaaattattagaatgagagagattagcaaggtctcagtactgttgtaaaaccaatacaaaatatatttctatatatcaagcaagtttaaaacacataatttaaaaatcatttataaaaatgtaagaccagaagtaagagccattaaaataattgattcaaaaactgtaactttctggaggtgacaccttgcaagaccataaaacctgggaacatacgtatttcactcttttagtacttgaactaagaaagaaaggaaaacagacaaattgccaagatgctaggtttatataaaaaggaaaagtggtgcatctgtaaataaaaatacaaaacactgtagaatgtagattttgtgaaaatatgaagatgtctattcaataaaatgtgtttgaaaaattagctaacaatttgaaaaaaaaaggctattacacattcacaatatataaaaattcaattacattaaaaaacaaaactgaagaagtattagaaatacaaaagaatatctttataacttcttttttaaaatcttttttcacttttactgaagtataattgacaaacaccatatatatttaaggtatactatgtgatggtttcatagaaacacacactgtgaaataatcaccacaatcaaactggttagcattcattacctcacagagttaccttctgttctctttgcatcccttcctcaccttctttataaattcttgataaggaagggcctttctaggtttgaccaaaacccagaagtcgtaaagaaaaacacaaaacaaccggactacataaagcttgaaaacctctgtgtgactaaaacagcaataaactaagttaaacaaaatctttaaaaagtaaacaatgctgatttattctacaaccaccataatgcactgtactaattcctactgtcaagtcattctttcctatattcgtcaggggcactctgaagtgccatctcaataatggctttcagctgagtaaagtaaggctaacaatgaaaaccagctaatgcatgtatgtcacagtcagtgttttatgttttctagtcattgatgaactgagtatcttttcatatgggatgaatctacatatactcagcaggagtggccttatcccattcttttctcaaacaaagacctttcagaagacctcgagactcacagagatatgcaggtaaacttgagcctttaataggacctaagtatgtggctgacgggcattttactttctcttcaaatatggtttaaacccatagatggtttacctggttgaattatcacaataggattataccaaagtgaattcttctaagaatgcaggtgccattctactcaccaacagtcttcatgtttcacccaagtatcacttttataactccatctctcccaacccaactgatacagtggtgtatagatatagagaatgaagtatgccatgagaataataataagcatggcgcaatgcacaaaaacacagactctggagtcacaccacaggtgttcaagtcttgaccacgtactggctgcctgatcttggagagagtcgctttaccttgttatgattctcttttctgtactgtaaagtggagatactaagacaataatgtccagttatcatgcatccatccacccactgttttccatatgtctactctgtatcagatggtatattaggaagtaggaacataacagtaagcaatcctccagttgtcagctactgatagggtcacttcagaagcatctgtcctctttcgccttcctcaacatgttcatctgaaataaactttaattatcttcttccacaaaaaccttccattcctatccagttttccccatatcattatcacttatatacagctgtccaaagcaaaaagaaatcacctacattattctttctctcactctccactggaatccaatccacgaaagttatattggctcaaacttcaaaatatatcccaagtctaacttctccaggtgggacttttagagagttcttaaaattccagtgacaagcatatggtggacactcaataaatatttctagaatgttatatgacaaaaccctatcatgggtttaattaaatacagcaaagcacaaagacgaaagtggatgataggacttgctttctaattgataagtaaatatcaacggtagcagctggcttccaagataacccgattaattcctcctactgggtatttacacccttgtacacttgtacactgtacctgggttagtctgtgtggtccatggcatacagcagaagtgatggcatgccaagtctgagattaccttataaaaaaactgcagtttctatcttaggttctccctcacagatctctgtgtgctctaggggaaagcagctgccgtggaccaagcaaccctatagggaagtctacaggccaacaaatgaagcctctagccaacaacaaataaaggaatgagggctactaacaaccacgtgagtgaacttgggggtggattctccaactccaagaaagaccaaaaccgacgacagccttggttgataacttgaacagctctcctgaaagaactggagccaaaactacacagctaaaccactcccagattcctgactttcagaaattacatgcaaagtgaatcattagttcttttattaaactgttaagctgtggggtaatttcttacacagcaatggataactaatacagaatctgacttttttaatctaaagaaaatatttaatggaacatttaagttttgaaaatttatgtatttgtatctatagcactgcttgcattcaggactcaaagtttactctcgggtttcaggcaagctgttttatgtcattgctaacctacttaaattaactcttagcacaatcactctctggacatttcactccattttgccacttaatcatgtgaaggaaaccagattctccctgtcagcaagattagtataaatcccacttaataagtaatatggatagaaaaagtagaagttgtaagtctattctacctgatctttcatattaacatacatctaaagcaagagtgaacgtccccagagagtaaaggacttcaaggctatcaggtcaaggtattcctaaaagagattctgattatccaagtaagtacaaggtctccagtgctagtagaaaagttaacaataggggaagcggaagacaggaattgctattgttttctgggcattttaagaaatattattagccctgcattacaggaaatgtttttgtactgtcctaagccaaatcattataaggccattttaccttgcaaaaggaaattagaatacaaaacacaaaattgtgggcaggccttaaccagacagttctttcccatttaacttcactacttctttaacaccgatatttttcaggattctttcgctaatatatatgctggctgagccatgatcatgactttagttctatctcggcttactcctaaatctattaatacatttctgactaaaactactctttcaaattccagatccagtgcttccaactaaacacctcagatctctgcatatatatgtggcaagtatctcaaatgctaacatgttcagatattaacatgaacatattaccttcaccaccaatcagccaagacttcttcaatatcctctttggttaactgttagcaatcacctaattgcccacagaacaagtcttagaattaccctgcacttatccttttgattcatgctgttaattttaacatatttacactttcatatttaaaactggtttcttgtagacagcaaagagctggattttgttttttatccattctgagaatctctgccttttaattggagtttggactatttacatttaatgtagtcattgacatggttagtttaaattctatatcctttgtcccatctgttctttattgccttttgacaaatgtgcaaaagcaaatcaatggaaaaaggatgagccttgacctaaatctcaaatttgtaaaaatagactggaaatggatgacctgaatattaaatgtgaagctataacacttttaaaacataggggaaaaccttggcgatctagagttcttaagacttgacaacaaaagcaggatccacaaaatacagaactgataaacagcactgtcatcaaaatttaaaattttttgccttgagaaagaccacgtgaagagaagagtctacagaaactttgagaaattgtttataagccacatatccaacaaaagactagaatctagattatataaagaactctcaatggtaaaacaaacaaacaaacaaactcacaaacaattcaattagaaaatgggcaaagacctgaagagatacttcaccagagacaaaacacagatcacaagtaaacagaaaaagatattcaacactattagccatcatcctgatgggcaatgtaaattataacgtcaatgagctatccttacgtgatcaaaatggctaaaagaaaactgagacaataccaaaaaatggcaaggatgcaaagaaaatggatcacccatgtattgttgatggtgattcaaaatggtacaactgctctggaaaatatctgggagtccatacaacacaataattacatgactttgcaattgcactctttgagtatttatccaaaacagtgaaaactcatatgtttatataaaacttgtacacaaatgtttatggcagccttacttgtaatagtcaaaaagtagaatcagcccacatattctctaatatgtgtacagttaaagaaactgcagtacatactatgaaatatcagcaataaaaaagtatgaactattgttatatacaatatcttaaatgaatctccagagaatctggctgagaagaaaggtaatcctatttgatttcatttatataacattttgaaataagaaacattttagaaataaaggacagattaataatggccaggggttagggcaggtgtagtcaggctggagaaatatgaacatagttccttgtgtgatggaactgttccgtttcttgtctgtgagggtgattatgtgaatcagcacaacccagacaggctgccaggtaactcttagttgagggcattatggtaagcaaaataagtcagacaaagacaaatacagtcagtcttccatatcaggggatgtggaacctgtgggtatagacggctgatacggctatgccattttatataagggacttgagcatccacagattttggtatctgcaggagtgctgaagccaatcccttgcagacaacaagggtcgactctacagtacaatctcacttatacgtggactaaaaaaagagctcacagacacagagaacagactgagggttgccagaggcacggggtgggcaaaaagggggaagagggtcaaaaagtaaaaacttctagttataaaatagtcatgatagaagatacagcagggtgagtatagttaataacactgcagtgcatatttgaaagttgctaagagagtaaatcttaaaagttcttatcacaagaaaaaaattctaactacatttggtgatgagtgacttactttggtgaccatttcacaatatatacaaatattgaatcattacattatatacctgaaactaatatactgtgataggtcaactgtatctcaattaaaaaaatttttttaacctggaaaattataaacagctaattagaatagtagagttatatcatctgttcacttttaagctttttctatttctcttattattgctaagaaccttaataatatctttcctacattataaataaaaaatgtattcctaaaaaaaccttaaacctcacagaatggtatcacatgtgtttagaaagtagcagagtttagtcagagaaaactgaagtcatgattccaggtacaagtagggatggataatggtcatatgtcagaaaatgacagtaaggccaagacttgactgtaaaggacagacatggtaaccagaatctgaaggtagattcaaacttaggtactatgttatcaaggagaaaaagacaagtggcatagaactacctttaagatcccagatgctcattcaaccatacgtaggataattaacagaagtcaagaaagctgacctagttgtgcccacttcaaaacatacaaacaaacaaaagcaaaatgttaaagttgagtcaagcttatttaacatcttactgaggactgtaggctggaagagttaacgggggaggtcggtatatatgtgcattcggtgaaggtgaatcttgcaaccaagcacccacctgggtagaaggttaatggtgtcagtgctttgctaagcatggagagatacaaggatccagattcataaaacaatttctcctgaaaatgcctatcggaaggcctcttctgccagttttcccagagcacattctgccctgagctcctttcaggggatgctaaaggtcagtgaccgcacagaccaaggactcaattcttacagaaactgcgggcaagaggtgttttttagttggcatttgtatcaacaagtcaatacaggttgtcaaatggcactgctttattggaaaactaactcagcagaagaaaattcagtcccttgaggtaatagggtactagccaaagcaccaagggaaaaagatacaataacaactgcacagggacacagaagtcagggtagatctgacctgaaacggaactactgacctggggctcttttgatagttaagtttcctagaagcatttagcttgaagaacactttcaagtagccaaaaccaaaacaatacaaagctcaaggtttatgatgtgccatgccaaacaaaaatcagaagcagacagacagaatttcatcaaatttaaacactatctagagatttccaattgccacgaaaatcttggggacaggaacttggtgagtaaagtcatggaagataaagctaggaactaagagactgaggagagctttttataagattgtgtttctcttaattctccctccaacacagcattgtaaagcagttatcttccagttaaaaataaatttaaaaaagagtgtttaatagttaaagggtaattctctaagacagctatgtgatttattcttcacttctttcaagttttccttcaaatgcccccctcatcaatgagcgcttcctaaaactctctacatacaacatcctttttcctaataaatatagttttttttccagacaacttatcaccatatgtcctacccttcctataattctctactagaacctcctttttcctaataaatgtagttttttttcccccagagaacttattaccatatgtccaaccatacaactgtttgcttattgattgcctgtattcccacagtaaaatataagcccaggaattctctttcatttgctgctatactcccgacacctagaagagctcttggcacacagtttgcactcagtaaatatctgttgttgaataaacaaatacagcataccagagataaagatagcataaccaggaaaaataatttaaatgtgcttatcctttccctatccatataaccaggacaacaatccagcaatctttctcttgttttgatcagcctgaaacagttcgtttttgtttaactgaaaacaacaacaaaaacaaaaggtttggctttaaagggggcccttttgtagtcagtccttccggtcttttgtttgtaacctttctgaggcagcactggtaacagctggtattgacaggaagtcctcaaaattcccaagaatgtgaaatcagttgattaaaatgaacacactggcaaaccaataaaaagaagtgaccatgaaaattttgttctgggaatggattactagtggcttagaatcttagtgattaattcttccatgtgcctttgcatttaatatatgttaaagagaaaatcttttcctttgaattttggcttggttaggctagattaaaagcaaaacatctacataaatgcttaaagtcaacggtatttctgcttttaaatgtatttgcaatcgtgttcacagtatgagatcttaaaaatatgtcattcgtttaaaaaaggaaagaaagaaatgaaatgtatatactcatcgcccttctaggaatttagaatgaaactagttatgaggcatccttcagagaactgaggagacaatcactcaaaatatcttctgtgtttttggttgagaaagagatgaccatactagtgagactattgctgtttttgttgttttagtcactaagtcacatccaactctcttgcaaccccatggactacactaagacattattaccaggcctggctctagtcatcaagtcttgaaatttgaaacttattcaactttaaaggctagccttctctagacatcatctgctctggaggccctttaactgccttgattgactctcatctccatattgtacaaagctactgttatactctatattacaagtatttccgtgtttttttaaacctaattcagttatatgaatatattttaaaagtgagacactttaagtatcgtggaagtacagaagaggaattgatgagatcgaaaggtctccacagaaaaatgggataaagtttaaagaggggtggatgaaggaatggggaaggaatggagagcaggcagataggaaaaaaggaggaagggaacaactcaagtgtttacagtgataaacatgctcactcaagtaaagtcttacaccacgttcttgcttctctttacttcatctctttgcttgaacctgctacaaccatcattctttacacttttactttgttataaatcaccatccattagcttttaaatctttcttctaatcccacccatccctacaagctggttgcaccgtttgaacttgtgtagatgactctcgctccagtaaaaagtaacataaagtgttctgtgtctgcagtaataacagaaaggtaaatcattttcaaatgatatcaattatcacaaatttaataaatgttcctgttaggctaaaatattttttatataaaacaaatatattctatcaacatacattataaatgttcttttttcaaagtgaggaagttttgcttctaaatctaaatagaaactttatcgtggaaaaatctaaaatgagaaaactctggcttttttcataggtgtaaatttgagatggaaaaggaccctgacgaatcacttctcatcaaggcaaatatttcttgtattcaaatgaataaaataaatttagaatgtttttcttacatttaaaaacttcactgtttcacactcttttaaacttgaatatatttatttcacatactttctcattcatttttttgcatatatttggactatcttaatcttccaacaaataatacattttcccaaaaccaaaatttgacattgggtggttttcccaaattgagagccaacaagaaatggcatactttctaccattagatcatgatttgaagtggttcatgtgtaaagattcacaatgtatttctgagataaagcaaatttctttctttgacaccctggaatgttttctttcactaaatgaaaactacacaatctactttattctccttttctcccttgtgccaaatgcagcagctcccccttacctagatttttctgcccttcccattcttctctttcccatgcatggtgtattattttttattcttttactaatgtgttcaaaaatttatgttttaagatttttattttttgctttttgcaaacatttattgcattcaaaaggaataatttttagaatggatatgactaatattcagaataatttctctcacatttctcacatttaaaaacttttaactgtgccaaaccaactccctttttaaccttttaaaatgtaggtataatttacataaaataaaaatcctaaatatttagttccatcagttttgacagtttaaaaattataacctgctttaagtcctttttggatgaaatgaaaggtataaatgaataaataattagttgattcattcatgacttgatctatgactacctggcagggtaaactggtaggactggaaataagaagaataagacactacaacaaccatatagataagagcagcggggtcagtttaagaagacagcagtgagaataaagaaggtataagataaaactgatattactatcaaggctagaaataaccaacatgaaaaaacaggaagaatagctaaggagcccactttacacattatatgtttatagtggtgttcaagaaagcctattttgaatcaggcatgaaaaagtagaagaccccctggagaaggaaagggcaacccactccagaattctagcctgggaaatcccatagacagaggagcctagtgggctacatatagtccacggggtcacaaaagagtcagatatgacttagcaactaaacaacaacatgaaaaagtcagatttcttgccttctcacagccacagttatagcagaaatttagtaaagaactcaaaagttactcaaatccttacacttataagttaacagaattctctctcaaactgataaccaaaaaatagttacacaactaaaacacaactatatcattactagagtgataaataaaatatgtactttgaaggctagctagttactgacctgacttcttcataaaataaaaatttgaaaagtgatgagaaaagtgaaaggtaatgagattcataaaatttcaaatcagctcttaaaaaacccatataagaaaccgatagattcccagatttaactttgagaagtatgttgttgttcagttgccagttgtgcccaactctttgctacgccacggactgcagcacatcaggcctcccttcagaagtatacagatctcataacaaactgtatcaaatacaaaagcacctattaaatatacttgagtacttagatttatttaactgcctttgtaagtagttatttcataattttcatatcttaatgtaaggaattttaaagttatctaatttcactttggttccttaattagaagtcaaattaaatattttgaaacatctagcattcaatgatcttcccattcaaacagtcattctgctgttgcttttcctcagtagaaacaattctcaataaatacctgtttatccatataattcatgcctcagtaaacatgtgagtatctactaagagccaagcactgtgtaaaacttggaaatacaaacatacactaatatactgataataacagaaagtttatttcaatgaatagtgatctatccatttttaagcaaatgaaacatgaaaaaactacaaatgaacaattaactaaatattaagtcaagtgaataacatcaatatgtggacgaatattccaatgtctcattagtttactttacgggacaatgccatattcaaaatgaaagtaaaagtaaacaagatcagggcatataactgattatatttcattatttaatgatatactaaagagattgtcaatttgaaagtagattactgagaaactataacagaaattcttccccaatgagaatacaaacttattaactactcttattactgttcactctaagttttcacctgtcttatgaacacatactgcctctcttccataccaatatgatacaaagaaattcagccttctaaagttttaagatttattgagtgcaagtaacattttgtgtgtcacttgattataaattacctagtcaaaacaacaaaaacagactataattcaggggatattcatcaacaaacaacaaaagttgctgatcttggtgagagtgcagtccaaattaaaaaggttaaaaatcagcataaaacatactgcaaaacatcaggtttaaattagctatgtaattcatgaaagaaaaataaattgctcttaaatttccttcactcataccctaaaggaagaatttcagcccgaatggaaccaaactagaaaataataccaacataatacaactagatgtagccttctctgaaaaatggtaatataaaataagaaaaaataagaaaatgtgtccatagattgtgatatcatcactccttgaggaagtaacatctatattcaactacctctttcccacatatactttcttctgatttctttgggctttaaaaatgagtacactttaaatatacagcgagaaaacactcacaagagcttttaaatgaaaacaaaatctgacccatagcccaatatatcgttaatgtcataataaatggggtagagggagggctggttgggggggggggcaagtgcttaaaataaaatgctgaacctaaaatttagccaagtagtgtaacttttattttccaaaacttatttcaagcaatatagggaaaaaatatctttgtttacaaagatgcaattttgttctgtaagaatactactactacaccaaacagaaacatttttaaatttattcttcagtaaaagtgattattaaaaaaaaaaaggaagtgctataaaatattaatttaattttatagaaaagaggaaagaatgtaagataattgtttatgaaaaagtaaagagattcaggattggagccattcacaaccatggcaattaaattaaatcctgaggagcaattatggaaaacagaagccaagggtggcaaaatttgggtctctcaattcaaatcctttttacgactaaagatgaaatttctctcttttacagccaatagattttttaacgttatattaagttaccaccaacaatttataaatatacctacacattttagttccccctagcccccaaaaagtctaatcccaaacacagaagcaatcacatacagatttttcccccctctcttgattactaccaaaaagaaagaaagaattaaaaaaaaaaaaacctccttgagagcgtagccaacattccagaaggcatttccgcaaaaaaggagttaaagggcagactgctcaattaaacagtcaggggccctttgcaagcctcctaggtatatccccagcagatatggtatcagattaaaggaactgcaaacaaactgggctgaaacctttctttgttcaagcccagcctcttcttcctgtgatgtcatattacaaatcgagcaagcctctctttttctcttcagagaaagctcgtctcgcaagacagctggcaactgaggaaaaggcctccgagtcagcaggagcaaacatgcttaggaatttatttcggaacctttgaaagactcctctgcttacccctatctgggatccaccgcaggaataccgaaaaggaaaacttcatttaaaaggtgtaagaaacaagtgagattgaactgggaatgtttaagtctcagaaactttgcactgaaaaacaaaatgtaattgctaacttcagcttaaacattctgcagcataaagaaactttcattttggaatattcatcttgaccacggaaacagaagtttgtttacaggatgaggagttttactccgtgtcagaacacagtttttatttaaactttataatccaatggattggcttcatagtgtttttaatacgaagccctgggatcacagatcttctggagacttgaaaatgaaaattttttcctgttgaagaatcaagtggaaactttatagccacaaacttcatgtttcttttggaagaaaaagaaatatttgtaaaatcttgcaaagatccaaaggatttgcaaatacactggaggttacaaagtaatcacgatctgaatatcaaaggagactgttgctgaccaaaggacttcaacactgtaaactggacgtgcctttataatggtaagcaataacagctctgactgcgtatacaatgactcctttaagtacaccttgtatgggtgcatgttcagtatggtgttcgtgcttgggttaatatccaactgtgtcgccatatatattttcatctgtactctgaaagtgcggaatgaaacaacaacatacatgattaacttggcaatgtcagacttgcttttcgtttttactttacccttcaggatattttactttgcaacaaggaactggccctttggggatttactttgtaagatttcagtgatgttcttttataccaacatgtatggaagcattctgttcttaacctgtattagtgctgatcggtttctggccatcgtctacccatttaagtcgaagacgctgagaaccaaacgaaatgcaaaaattgtttgtattgctgtgtggttaactgtgatgggaggaagtgcaccagcagtttttgttccatctccgggtaacaatacttcagcaacctgctttgaaaattttccagcagctacatggaaaacctttctctcaaggattgtaattttcatagaaatagtggggttttttattcctctcattttaaacgtaacttgttctagtatggtgctgagaactttaaataaacctgtaacattaagtagaagtaaaataaataaaactaaggttttaagaatgatatttgtacatttggttatattctgtttctgcttcgtgccttataatatcaaccttattttatattctcttatgagaacacagacgtttgtcaattgctcagcggcaatagcagtaaggaccatgtacccaatcactctctgcattgctgttttaaactgttgttttgaccctatcatttactacttcacgtcggacacaattcaaaattcaataaaaatgaaaaactggtccaccaggagaagtgactccagattctctgaagttcaaggcacagaaaactttattcaacataacctacagatgttgaaaaataagatacctgacaatgaatctacaatataagctgtctgaaataagaacaccaggactttactgggacagaacctctaaggtccttcaactgtgaaaattgttttcctggacaacaatttttccacctcagaaagaaaataaacatgtggacatttaaaagtttttagtattaaaaaagtatttgctgtgttaagcattaaaatgtattctgttcttgtatacactcagttttatttttctgagccactttgatttgtacctttctcttcattagaaaaaaaaactctagaaaagttgttcaaaatataaaagtaatcatgatttaagtcatgtgataaccatctgtacggtctttgaatatctgattttatactaaatatttaacaaatattaaaattttcatttaagtgtttaatacctttattcagtatacatctaattttgatttcagtcttaattgaatctctaatcatgtttcttaaactataataacataaatgagaaagagttatttaaagaatccataagtgtctttagagtatttttcaaaaagacagtaaaaatgtcttctgtagaatgacatactgacactatttgaggatgtcgagcagttacacttacaggtaatatttaggattttgtcttggtatgcaatttataaaaagcagagactgtatatatagaatagtatactttaaaattacacttttggttcattttctgcatttaacagcactcaatttaaaaacaatgtatgttgtggaaactaacaaaatgttattttgctaagtaaattttaaaaaatactactacaggtatattttaaaggcatatttatgtcacaataagtaacttgttttttaagtattttagatcagagaaataacatataatacttgacacttagacagtgatccatacatatgttttgattatttaagccaaacaaatttttaaatgtctagaaatttgtattttccctttacagtcaattagtacttttctccatatagaattctaggcttacaatcattatctttctgaacttttgaggccttgatccatctttctttaaattgcaaggctgttaagtcaaatattgaatagctgaacaatattatttcatgtagacaagatgttattgtatgtcaaaataacttgtgaagtaaggacacaggtccttccataaaaagcagcaaaactagaaggtcacataactaagtacaattacattttcattttactaaacataaataaggtatcgcctagagctaaaatttagatatgaagcactatctacactgaaacgctttcattttccaacatatcttttattccccaaattcaagcagttttccaaagttaactaaaaaaattatttattagcattcaatctatctgattttcacattttcaatctttcaagtcctgaatacaaatttggataaacaaaacactctttaaggtttaagtttgaattttgctgttctctgggtttgagctgcaatggtttcaaataaatcacagaagtaagctcatatcaaaactcatttcaaaaaaaataacagtggaggattttcttgctagtaagtgatagtctcctttaagtgaacctaaaacaaaataaatcctttaaaaagaaaactagtgaagaaattaaacatagctctttttaattcccaagagaagtatatatgttgtaaagatgttttcttcaattgaccctgaagtgcctttatttgataccattcttcagaaaaaaaaaaaaaacacaaatatatttagcactctaaacatatatttttgagttggaaagcaactaacaatttaataatacagaagaaaggtgcagagcttgtaacagatttcaaagaagttttcttggattaagtatctgagcaagaattcaaaagcatggatattattttaaaatataagcaaaaatagtcatcagatagttgttactactggagaaatttttgttgcctgattgtcaacaggaagatgaatcaaaaaatttgtaagactcttcttgaatacataacagacaaatattagttttcctcaactacaacttcaaatcctaggtaaatcttaactatagggacaaagagggtacaaaagttattcttctctgctggttttgcatttttaagtaaattatacattcagagggttatctctttcccttttacccagaaaatctgtattaagaaaactcagaatttactttttgtttccttagaatgacaatactagcccctccctcccccaaaactgcccactgttttttacatctttaaaaagagtagataatttacctaatcttcctttctgtattaaagtaaaagaagtaagatgaaaagttttgaagtgtgtaaaaccactttccagaatcctaaggatttcgaacttagaagtgatcttttctaagaaaatcaaccaagtagctagtttaccaaaagaatgtatgaaaatatatgtgttatatccacagaaaattaaaagaaacttaaggcattactttatcaaggagttttatcttcatatcctacattcaaaataccgagagtcaacctgacgtataaaccttaattatgggattggtatttaaagaattagtgactcatttgaggaatagaaaatggaacatcagcaaatttcataaacccaactgagaaacatttaacttataactggtatgcagctagcaagaacctgaggcaactgcaattttagacctctgatgaacaaggtacccagtctttcgtcactgtattaagttactcctgccctgtggactaatctttactatctcccaacactcaagaactttttaataactgcatgccacatccaaccccagatatcacaaatgagggaagatatgacccttatatatataacattttataaatagtgcctactagtagatgaatcttaaggaaatcctaagggaaattatttgttaaaagttctttgagctgtcttgaaaaccaaataatccacttataatatgacttctaaaaaataaaactccaaaattaaaagaatgaatggataaatgtaaagacacagaacatatttaatcaaccagagtatttaatgatcaacaatattccttaaatagcaacattttccagaggtcaacattacactatcctaaaatcactagttcttaaatttcttttacctctttcttcatttttttcatgacgtctgctaccaatttttttgaccgtcaattttataaaagtacaaagaatatcacttaaacacggcaataatccaggataataaaagaatatgaaattaactccaggcaaacttttctaacaagtctttctccttccatctcttaaaaagatttatttcagtaactccttaaaggggaacaaaattaccagtgctaaaagcagtggccgaaacagaattcaagatacaggaccccagaagtagagataattcacaaatttaatgaatggttttcaaactcaaaatttgctttacttatatagattcaaccaatactttttgaaaataattggaatatttatggccagcaggaatgtgaaaatatattcaacatcactaattaaaacaacaagagatattacttcatacctgttagaaggactattctcaagaagagaaggactaacagtgttggtgaatatgagaagaaaagagaaccctcccacagtgctggtgggaatgtaaattggtacaactatggaaagcagcatgagatgcctcgaaaaattatgaatagaactaccatatgatctagctgttccgcttctgagtatttatttgaagaatatgaaaccattaactagaaaagatatatacattcctatggtcattgtatcattatttttaatagccaagatatggaaaccacctaacagcccatcatcagatgaatgaataaagagtctgttatatatctgttaaaaaaaaccttgccattttcaacaacatggatagatagatccaggaggcattatgctaaatgaaataagtcagatgaaaaaaagataaataccaaatgatttcacttgtgtagaatctaaaaaaaaaaaacttgtagatactgagaacagatagtgattactagaacataggggctgaggggtaggtgaactggtgaagggcgtctattgtatggggatcaatggtttttggtgatgatctcttcatagtgtatacagctgtcagactgcagtggtacacacatgaaatttatataatgttatataccaattttacctaaataaaaacaggaataacctatggaaataaaatagaatgagaaacaaatatgtgcttttacagccaagttacagttattagtcatagggtgaatgtgttgagtttcattatcttcctatcaaaatgactggtgggaaattcataatttaaaactgaaagagtccgggggtcatttatacaacttctttatcttaggtagaagaaacggaagaagtaaaaggccaagtaacttcataaggtcacataacaagttaaggtagagtcaggtaaattttttttttaacttgtctactcctttaatggtggtaaagggagtagcagatgcaaaggcctccttggagagaacctggtatgttgaaaagattagaccaaatccacagggtctggagatggagggctgagatccctcataagccatgatacagccatggcaagctctaaggaggtgggggggcgcgctgaaggattccaagtagaaggaaagacacgagcatgcatttcaaaaaactcccatccctctgattatagtgaagagatgcatttaacttcaggaaaaagaaaaaaacaatcacaaaaggagctatatttatttcatttaaatttaaagagattctctatgtcctttcccccttattaaactgctttctttttgaaatgatggtgatgatgagtaggaagactattttaatgtgtgttacttgggaaaattaagttagcagccctgcggagaaattgataacattcatatactgctggtgggaaacaaaatggtgtaacgctaatgggtgggaatttggtgcacgcacacacacacacatacacacatactcactcactcctaccctttacctcagcgttctgatttctaggtacttaccttgaagacacattttcaataatataaaaatgcatatgtgtacaggatgcagtactgtttgaaactggaaaacactgaaaactccctaatgtccaagcacaaaaaattggttgaataaattacaacacatatacacatattcacagtgcagtatgttagtctttgagaattcttaaagagtataataaaaatcttaaagagaaattatctgttgtaacttaatggaggctgaaactgagcaaaaacaataaaattttttttttggcaaagagtgagacacaaaatacagctgtttcctattctaacttttcttatcatgttctaaatctagcacgtacaggaagacaccaaaaatacctttgatatctatttctgacagtagcactaaatactaagaaccaatattcaaattaataaagccacatatgcaaaggccacttgaatgcattttaaaacagactagctgtgacagtttcgtttctaaaacatgacataaaaatctggaaaagatagatgtcagaaagttggttctattgtataattgaaagtaactgaacttacagtgtttaagaacaattgccctagagtggttctaaaattttattaaactcactattaataacagcttctgattttgctggaggaattcagaaactacattaaatagaactgagatttcataagatacttctttttttttgttccttgcatgtccagattccagagtccttcctcactgttacagttaggatatgacatgacactagtttagagactgaaaattcttggactatattcaggtaattttctaacatcatgactttatagaagacactctctgaacaagagtacaagtgcctccatttcaataggttaagtaaagaggatatttccaagctattcttttacaattgccatttctcttgtttgtacttgactaatgaacactgacctcagggtaattagtgacatgattcacaactaaagcaccacaacaaattccaacggcagtgtaacagagaacactgcccacatttaacaatgctggagttcagttacacctctcttcccctgaacttactccattctgagaaggcagtgagagaaacagaggtacatcagaagagaaaatttctacacacttgtaagccaggacaaacagatccaatactgtttaactgtgttctcagtcctctgttcttaggaaatcactgtatagtagagaaaatgaactaaaagacactaatgattaattgtgatgtttctaaaagataccattctcataaatgtacatttattcctcatggcaaccctgataactatcatcacgcccattttacaaatgaggaaaatacagtctgagctacagacacataacttgctgagaatcacaccaagcaagttacatggcatctctgaatgaacctcagattttccttgtctgtaaaacaggaacagcaatgtttatcttctgggaagattaaatgggatatggtgacgccaaaacccagacagaaggatctgctatagcacagtgacacaaacacagataaaacatgaataaagaaactaatcccaatagtgcatacacctggtggtaaattaatatacaccacgaggcagcacaaaggttgaaagtaccgtctctgggaccaagccagtttgactcaaaattctagctctgctatcaacttagttttctggataggggaaacgttcttaatttctctgtgcctctgatttttcatccatgaagcggtgataacgagagtatctatcttcatacatttgtccgaagtaaatgagtgaacacatttcggcacttttaacagtgttggatgtcacctactgtcacttctacactggaatgtaatatgcataagtgagggtcattttgatgtaggtctgcatgatgatcagattccaaagaacctagtgatgagcttcttacaagcactgcttcctatagcaagtctctatgagctacctaaggggcatttctgagtttgagatttttatgttcctgaatttctttagtcctttgtgccaattcatgaacaaggagaatgtgtcacatggatgatgggggaggggaagggagccacgaatggacaagtcatgaatacttttcctccacagtgaactcgagcaatttctcatgtgtgtcagggtgttccaaagattaaaaaaagagacaagtgcatacagaaaagaacacactgaggagtcaagccccgggctcgagacaagacggcacttgaacaaaggtccagagatggaaaaaattttacgtttaaaaccataaacagatctggatcaagaactcaggtccacataaacattcaatacaggagaagatgtggaacaatttataacagctatctatctcagtttctttgggttttctgtttgtagttttttaacatatgaagaaccacataaaaaaaccacttaatgcctcactgcttcttcaatggttcaattatgaagaaaagttattttattaaattgagcttacctagagctttctaaagcaatcacttatttgcatttcagtggataattgtccatatgaactaagttactatccttatttttgtgctttttctgtatatctgtatttttttttaacttctctctagactactttactagtagaacacaaggtccctatgaaatattttatttataagatattgccttcctttatttttcattcttggactttacatttttttcattcttacagaagatgttaggcatacctgaaatttttcttttaaaactcagaaagaactcagttttaacatttcaatctataaaaagagatctagttttccatttcacctcattctcacccttcccttcaatctccctgagaattgattcaaatatctaattttctcaactctaaactacatatacaattacaggttttaaaaatacttatattactatattaaaatatcattcagagagttatataaatggaacatacagatgcacagtaacttcttttaaaatcgagttttctccctttggaaagtcttctaatcttttcttcctgaggaatctagtagatcaacagtgacagtacaccacacaaaggagtgcctcacaaagggctgcattttctcccgtttccagtaccaaccagctccagggcagaacagtcatcttgttactcaagataaaaaacgtacatgctagttttttcatttagaataaaattttatactgtcttctgtgctggactacatgctacagtggtaataaaaacagtgtgaatgaataaacagaaataatgtggcacaatgaaaggagaactttactagactaacacgaaatttggaatcaaaccagtctgggttcatatgccaagtgggtgactctagacaaactgcttaaccttcctgagcctgcttccacttttgaaaaatgaaaacagtattaacaacatcacaggatgattatgaaaattaaattagacaaatacttttggtgcacagcacagtgcaactagtcaaggagtattagctaccttccatctatggctaatgagctgctagctgggacacagattcctaggttcctcctcatatgggaaattagattcacgcctatacctactttgtggagtcagtgtaaagaaccaagagagtacttcactttaaagtcaaaatcatgtacagtcatctaggatttggccactctaaagagtggtccacgggctagcaacatcagaagcacctgggggcctgtaagaaatgctgaatctcaagtcctgccctagaaccacgtgataagaaaatttattttaataagatctccatgtgtagtaaagtttgaaaaatactactaagaaaataatcctctgcctagaaggaagaaaagaacattatcaatatcaactgtgccaaaaaccccaaagtacaaagggcatttacaatagaacatactgatttaattagctcaggaaagcaagttagagaaaacaggcatcacggactgacagaatctgaaattgtgagaaatacagaataattcacaagaaaagggagggggaaggcagaaaaaaaaaattaaaacactgggtaaagagcacaatattttccagaagcaaatgggcactctcacccatgaataataatgtctataatgatgtccctagctcaaaaagtaaaattactttaaatacactctgcctaagaagacaagaaagcatatatattctttcaaaattatttccctcaaaaaacctgtgtgtttacacacatgcacgcatatacacacatatattttatttttaagtagtgcataaaaaaaattcaaccctgaatattcattggaaggactaatgctaaagttgaactctactttggccacctgattggaagaactgactcactggaaaagaccctgatgctgggaaagattgagggcataaggaaaagggagcaacagaggatgagatggttggatgacatcactgactcaatggacatgaatctgtgcaaactccaggagatagtgaaggacagggaagcttggtgtgctgcaatccatggggttgcaaagagtcagacacgacttagcgactgaatgacaacaacaaaattatcttgtacattcacttttgtacaatatctcatttaccaagagagctagctctttacttttaaagagattaaaaacagacttttgagactaatttactagtcttaaatcaggactcatgtaccattgccaatgtggtccataattttcccccaaatatctttccacatttccacaaccagtttgttttttcccatccactttacaattgattactccctcctttgaccctcatggcttatcttatttcacagtatatcacaatgatttagtttcctataggttccaagcctctttaagggtaggggctatttcccatgtcattagatacctcgctggggcaagtacaattcctttcaaataactgatatataaatatcagatacgatccaaagagaattgggaaaaactgaggtaaaggagagcaaggaaatgagacctctctgttatccttttttgaaaaatgtttcttcaacattttatacattgtaaagcaatctaaagaagtggcacaccttcagcagtggcaaataattcttaacatttaaatagttttgtagaatcataaaatatttgagctagaaatactaaaatctttttggtctgtctcaatttacaaagcaagaaactaagacagaaacattaacttatacgtggaagaggcaggctctaaatgtcaggtcttctgattcccacattaggccatactcactctcactatgtcagtgtggtttgctccagagatcaaagaactctctgaacacagtgtttcaccatgttgcaaaggaaggatactccaataaaaaaaattaagaaaaacaaaccaaaacaacaataaacatagggagtgcttaaagaatagcagaaggctagaaaggtaatgcagggtccaattatcacaaccagagtaaaaaggctgcatttatctaatggcaatgggagctactgtgggtttctgaacaggaacattgcatgaaaaagcatttaagaatattcactcagcaccaaactatagaatgtagggtagtcccaaagctgggagaccaggcaggagtctatagtagtatgttcaaggtaagaaggtaatgatatgatctagaaaaatgtaaatgaaaatagataattaacatactaaataaatatgacacatggtaattttttttttggtttttgtatttataattactgatcaactttaactgatgcttttgaactgtggttagagaacttcttagagaagactcttgacagtcccttggaaagcaagaaaaccagtcaatcctaaaggaaatcaaccgtgaataatcttgtggaaggacagatgctgaagctaaagctccaatactttggccacctgatgtaaacagttgactcactggaaaagaccctgatgctgggaaaaactgaaggcagaaggagaagagggcaacagacaatgacatggttggatggtatcactgattcaatggacatgaacttgggcaaactccaagagacggtgagggacaggaaagcctgacgtgctgcagtccatggagtcgcaaagagttgcacacgacttggtgactgaacaacaacattttatattacaagactctataaaactacagagaaaaagaagaaaaaaatgttcactattcaagcctcgatgacttgaatagtaaaatgtaaaaatacaaatattgggaagcaaaggtgtatgtagaacaaaataaaataattttagctttgaaaggtaaagtcaaatattctaaatcacttgaaagcgcctacttaaccatgggaattaagggcaagaaattaggagtatgctgggtcagaatgagaaacattataaaaccacagtgatgttttcagaaagaatcagatttttaaaaactaaaatgttttgctggataaaagataaatatatgcttacttaaaaaaaaaactcatgaggagctttaaaaaaacccaacataaagcatttttcattacagtagcatggttgctgtataaatatagtatatgacatcatattacctcaccatccttatttttttaagtgttaaatacagcttaatcattatcttacaattcgtttgccttcctgagacactgctctttgtaaaatataacttttgaaaaaaactaacgtctaatggtaaatactaaaaccattgtgcaaagtgcaccagaggttaatgatctaccatccaaatacacaacagatatcctttttggctttttcagagccacaggcttttctcccttttgtgttcatttcctgtcaagtttgacatttcaaaagaataccaaagaagcttaaaaatttgtttacaagtgtgtcattaaatcagaactctaaaaataaaagctattcattgcaactgtactgatgtataaaagaggccttcatttaaattttggaaaaataataaaaaaggaaacatttttaatcttttcttatatagaagtgctctggtccaatatttttgcaactgaatgaagaaacttgctgatgtgtagtgacaacaaaaaaaataaaaaaaaaacacacacacaatagaatccaatttaatgagtcagctatatttgatagtatttagaggaggctcagctttcttatgacttattaaaatttaatacaacaattaattactaatacttctacgttctccatataataagtatcctccgaaatactattattcagaagatatgatgcatttaatacaggaaaatagaaatgaaaccctaaatattctttaagtatacatattcaaaaatctttatcaatcactaaatactatacataactcttttggctgtgataaaggaacagagaccagatttgtcttaactacaaaatcaaacaacataaataatagttttcagacactgagtacatgctagtaatagaacaagcagtataagacagtaattcctggggggaaaaaaagcaaatgcttaagctccacctttgcctggagagttcccaggttacaagtcagggaggagaaactgaaatagacctcagtggtctccctggttgaagaaacagaattgagaattcaagacagagaaattaggaaaattagcaggacagagtagcagaggagagacttacacagaaaagagagagttgcaaagagagcgctccaggagtctgcagagagttactctcggtctttaccccagtcctgatcaccgcctgcaaactactggaggccaaaaaaagaagcatgagaagaagcagaaccattccaggagctgtaacagggccaagaagagttctgattgccaccagccagtctggaaaaaccttgtaatgtatgagacatcaggtagagcacctagaaggggattgcctcaagagtggggaaaaattagtcataagattaaagactggctttgtctagaaaaaagaaaagcctttaaaggatcaaacgcttccaagtaactaaactgtgtcccaagacacaagaatagtgaaaggaatatgaaaatatccaggaccactaaggtagaaattcacaaggcctggcatccaataaaaagttaccaagcagcagccccctcaaaaaaaagacccttcaaaagagaagtatcagtcaatagacagtactaaaaagatatagatgttagaattagtggacagggactttaaataattattataactatattccagatgttgaatgtaaaggaaagcacagacatgctgaagagagatatgaatgatttagaaaaggattcaaatcagattctagagatgaaaaatctaatacctaagattaaagcacagtagatggaattaacagcaaataagacatttcagaagaaaacaattaatgaacttgaagacataggtgtaatagaaacaatttcaagtgaaatagaaacaatttcaagtgaaacagaaacaaaacgtctgggacagcaaccagagcatcagggagcagtgggacaattttaagtgacctaatacatgtgtgaccagaatccctgcaggaaggggtgaaaggagtcaacaaaaacattttgagaaaataatggacccagatttgatgcaatgtataaggccacatttcaaagtagaacgccaagcaagagaaacaggaaaaaaactgaattaaggcatatcttaatcaaattgcttaaaacgagataaagggctgctctgtaagaagggcaactactataaaaccaaaaatgctatgctgctgctgttgctgctaagttgcttcagtcgaatgctatgagatgcacagtttctcatatgagaactcaggaggataagatgaggagggggaaaaaaaaaacaaagggagggagaggtcagcacataccagatagaagcaaggtaccagacttctaagaaacattttagaagtgaatcttgccccagaccccagctgacaccgcatggtctgggaggaactgtccagtctagctcttcccagattcctgacccacagaatcataagcaaaataaagtgattgttttaagccactaatgtgccattcagcaatagataactcatttatatcaacatttaatccttcctttcccatcttgaaaaataattatcctgctgcctcacatacctccagctatacttccctttacagataaaactggtagaaactatttataaccactgtctccatgttatctctcactcataactcagccaaattccactgagatggactcctgctcccatatcacttctgacagtccttgctaccttcaccagcggcttccttgctgccgaaactaatagccactcttcagttgctactgacttctcccacagtatctgaaatagcaagcactcagaccttttcattctctctttatgacaccatttctgatatttctccttagtgacaggaggattccttgatttgatctcttttgtaggcttctgttttctgtctaccccttaactgttggtgctccttaggattctgtcctaaattacattctctttttgtactacactctcctattaagtgactttattctatttcctaaactttagtcatttggtaaaacacagggatttatagttttggagccagagagacctgtgtttgagccataagctctgctgtttagcttatatggtttagggtaagttattaaacttctctaagcatttttttccctcatttagaataataatacctcatggattattataaaagtcaaatgagataagtactcaccatagtgtgggtgacacaagataaactgtcaataaaagctggtaatttctgatattatatatgtgccagcagctctcaggtttctgttcctggcctagaatttctttcctaaactccagacacacatacccaactgcttctcgacacctgtacttgatggtctacaagcaattcaaactcaacataatcaaatttcacctccaaggaaatctcattcacttccagctatctttaatgagtgacactaccttaatgtcataagttgaccctttctctgtccttcattctcactcatgtaattaactgccatatcttataatacaaagccagagatgctgttccaagtgcttttcccatacattaactcatttaaaatgaaacacacacatgtaataacatacaaagtttataaatgaccaggaagtagtattgatcaacactgtaagactgcaaaggaggaaagaatgactatagacttaggatggtctctaaaggcaaagtggaagtagacctgaaaatctggtaaataaaaagggcaaagtatttcaggtggacctataaagtgaacaaagactcagaaacaggcacagacaaacatggatgtgtgagtaatagtaaacagagacatctgaatcaagaacagaatataaggaaagtattctcaaaatattttggactcagcatcttttaacattcttaaattattgaggacccagaaatttttgttcaagtgaatgtgtctatcaatatttgagagccccttggacagaagaccctggtgggttacagtccatagagtcacaaaatgttggacatgactgaaatgacttagtacgcatgcaatattactgtgttaataattaaatcttaatttaaagttaattaagaaaactaagatcatggcatctggtcccatcatttcatgggaaatagatgggaaaacagtggaaacagtgtcagactttcttttggggggctctaaaatcattgtagatggtgactgcagccatgaaattaaaagacacttgctccttggaagaaaagttgtgaccaacctagatagcatatcaaaaagcagagacattactttgccaacaaaggtccatctagtcaaggctatggtttttccagtagtcatgtatgaatgtgagaattggactgtgaagaaagctgagtgccaaagaattgatgcttttgaactgtggtgtcggagaagactcttgagagtcccttggactgcaaggagatccaaccagtacatcctaaaggagatccgtcctgggtgttcattggaaggactgatgctgaagctgaaactccaatatcttggccacctcgtgtgaagagttaactcattggaaaagaccctgatgctgggagggattgggggtaggaggagaaggggacgacagaggatgagatggctggatggcatcactggacgtgagtttgaatgaactccaggagttggtgatggacagggaggcctggcgtgctgcagttcgtggggtcgcaaagagtcagatacaactgagtgaccgaactgaactcaagtatacttaaaactgaaaaaattttaagaatgcaatttatctgaaataaccaaaataagcttgctatggacatgagtttgagtaagctctaggagttggtgatggacagggaggcctggcatgctgcagtccagcgctgcaaagaatcagacgtgcctgagcgactgacctgaagtgaactgaagcttgctacgtgttaacagagctaacattttcatggagcctaactctatttccctaaataaacaaaaaattaaaacagtggcagagctttacaatcctgcaaatccttttaatatctagcctatacaacagacctgaattctcatatctgcttctgtatttccttcattgaaatgtgttgtctgtttgaagtatacgaatatctggcctcacacaacatgtagttgaaaaaaggaggagtattttaatagacttttcagataataaaggatattcttttttgacactaccctaaaactcaacaagcagtagtttcttaaaggttaattgcaatgtgaaattggaagtaattttcatgaattttaattttcattgaatttttaatcttaattttcatgaattttaattcatgagttaaacttcacattcttagaccttaaaaaccattgatctatctatcaaagaccttaaactctgaataaacttcttactcacgtatgattttatagcatgatgcatagatcttacaatgctgatgaatctctttatgtaatgttaaacaatcacatttactaacactaccactgaattcatcagaaaagtctttgatgtattgggaagctattctgcttacagtaaatacaagactatcaaaattctaattttcccttgagaactcaaaacttatcactggcaacgtttataattagttgctttcaaccacactgtacttgagaatacagattatataaaataaatacttttaactggctcatcagtgatgttattaaatgaaaacaggcatgttttacgttgtttcttttttaactgagagtttgtggtggtgaagaatacactgaccacaagcctggaggggaggggacttaggggcagaaagcatacaagtatatatgtggctgatcaccagaaccccttcgctgttcaccagaaactactacaacattgttaatcagctatacccaaacacaaaataaaaagctgaaaaaaaaaaaaaaaaacacaaatgctttgatgctactgctgtaatccggtgcaaaggttccaaaagttttggaataaatgtcattggcataaatgtcaacagagtgaaaaaaagaaataacatcttaatggtaatatgaaaatagctttcacattgcagctcccctaaaatgttttctgggatcaccaggggatcacagaccatactttaaacagctgataagaaaaaaggaagagacaaagcttctaaaagaagccttgtaatcatcaaatatttacttaaaattcccacactaaaaacatacatttgattcctttgaccctctctgtaagctgggtaattatagaactgtattctgaacaccataaatgtttaagttattaagattctggattctgctatttttctcaaatgagtattgtttgtcttaaagcaggtaattatttttactgaacttgagttgtaaactgtttattcaccagcagcttctgtttcaagtcacatctttcgcctcaagctggttttagaaaaggcagaggaaccagagatcaaattgccaacatccgctggatcatggaaaaagcaagagagttccagaaaaacatctatttctgctttattgactatgccaaagcctttgtgtggatcacaataaactgtggaaaattctgagagatgggaataccagatcacctgacctgcctcttgagaaatctgtatgcaggtcaggaagcagcagttagaaatggacacggaacaacaggctggttccaaataggaaaaggagtacgtcaaggctgtatattgtcaccctgcttatttaacttctatgcagagtacatcatgagaaacgctggactggaagaaacacaagctggaatcaagactgccgggagaaatatcaataacctcagatatgcagatgacaccacccttatggcagaaagtgaagaggaactaaaaagcctcttgatgaaagtgaaagagagtagaaaagttggcttaaagctcaacattcagaaaactaagatcatggcatccggtcccatcacttcatggtaaatagatggggaaacagtggaaacagtgtcagactttatttttgcggggctctaaatcactgtagatggtggctgtagccatgaaattaaaagacacttactccttggaagaaaagttatgaccaacctagatagcatattcaaaagcagagacattactttgccaacaaaggtccgtctagtcaaggctatggtttttccagtagtcatgtgtggatgtgagagttggactgtgaagactgagtgccgaagaattgatacttttgaactgtggtgttggagaagactcttgagagtcccttggactgcaaggagatctaaccagtccattctgaaggagatcagccctgggatttctttgtaaggaatgatgctaaagctgaaactccagtactttggccacgccatgcgaagagttgactcattggaaaaaactctgatgctgggagagattggggcaggaggagaaggggacgacagaggatgagatggctggatggcatcacggactcgatggacgtgagtctgagtgaactccgggagttggtgatggacagggaggcctggcgtgctgcgattcatggggtcgcaaagagtcggacacgactgagcgactgaactgaactgaactgaaagccactttgagacaggctttgctggtggctcagtcagtaaagaatctgcctgcaattcaggagagccgggtttaatctctgtgtcaggaagatcccccagagagaagaatggcaacccacaccagtaactttgcctggagaattccatggacagaggagcctggcaggcaacagtccatggttgtttcaattttccagtttccctagtcagaaagcctgagattttcccactggcactcagttcagttcagttcagtcactcagtcctgtctgactccttgtgaccccatgaatcgcagcacgccaggactccctgtccatcaccaactcctggagtccacccaaacctatgtccattgtgttggtgatgccatccaaccatctcatcctctgtcgtctccttctcctcctgcccccaattcctcccaacatcagggtcttttcaaatgagtcagctttcctcattaggtggccaaagtactggagtttcagcttcagcatcagtccctccagtgaacacccaggatggactggttggatctccttgcagtccaagggactctcaagagtcttctccaacaccacaggtcaaaagcatcaattcttcggcgctcagctttcattacagtccaactctcccatccatacatgactactggaaaaaccatagccttgactagatggacctttgttggcaaagtaatgtctctgcttttcaatatgctgtttaggtttgtcataacttttcttccaaggggcaaacgtcttttaatttcatggctgcaatcaccatccgcagtgatttcggagctgagaaaaataaagtcagccactgtttcgactgtttccccatctatttcccatgaagtaatgggaccagatgccatgatcttcattttctgaatgttgagctttaagccaactttgtcactctcctctttcactttcatcaagaggctctttagttcttcttcactttctgccataagggtggtgtcatctgcatatctgagttattgatattcctcctggcaatctttattccagcttgtgcttcatccagcccagcatttctcatgatgtactctgcatataagttaaataagcagggtgacaatacatagccttgacgtactccttttcctatttggaaccagtctgttgttccatgtccagttctaactcttgcttcctgacctgcatataggtttctcaagaggcaggtcaggtgatctggtattcccatgtctttcagaattttccacagttaattgtgatccacatagtcaaaggctttggcagtcaataaagcagaaatagatgtttttctggaactctcttgctttttcaacaatccaggagatgttggcaatttgatctctggttcctctgccttttctaaaaccagcttgaacatctggaggttcagggttcatgtattgttgaagcctggcttggagaattttgagcattactttactagcatgtgagataagtgcaattgtgtggtagtttgagctttctttagcattgcctttgtttgggattggaacgaaaactgaccgtttccagtcgtgtggccactgctgagttttccaaatttgctgacatattgagtgcagcactttcacagcatcatcttttaagatttgaaatagctcaactggaattccatcacttccactagctttgttcgtagtgatgcttcctaaggcccacctgatttcacattccaggatgtccggctgtaggtgagtgtgagtgatcacttctttgtgattatctgggtcgtgaagatcccttttgtacagttcttctgtgtatttttgccacctcttcttgatatcttctgctactgttaggtccacaccatttctgtcctttattgagctcatctttgcatgaaatgttcccttggtatctctaattttcttgaagagatatcgaagtctttcccattctgttgttttcctctatttctttgcactgatccctgaggaaggctttcttatctctccttgctattctttggaactctgcattcaaatgggtatatttccttttctcctttgctttgtgactcttcttttcacagctacttgtaaggcctcctcagacagccatttcgcttccccctatacctcccagccccaggctaaaagcttcctacccaggcccacaacacccttactccatttcttaacccacaacacccttactccatttcttaacccacagcgcccttactccatttcttaactcagctgtctgctctaaaaggtcagtgacttcaggcgattcctttggtagctcagtggaagagaatctgcctgcaaatcaggagacacagaagctgtgggttccagccctgggtcaggaagatcccttgaagaaggaaatggcaatccatccagtatttttgtctggaaaatctaatggacagaggagccttgtgggctacagtccatggggtctcaaaagtccatggggtctcaaagagtcaggcacaactgagtgtgcacaggttttatagttgtatttttttgtgaggagtcatatggtatggtctccctccatattaccagaggtagattccttacaaaagatttttcatctgaggaattagaatcatgagagttgttctgcatttataaaaaatttctctggtggctgtgagagaaacagtgttaaggtagccaaacatgtgtgtagatcaagaggaaaaatccacagaagtccacaaaaaagaccatttagagaataaactacctggtctatttcggtttacaaagattttactgaaaaaatctaacacagtctgaatatactgaaagtaaaatatccaaatctcacctcatcatctactggcatgataaactgcttaacagatttaagaggcctaaagtctgtaagtcatttggcccaatgcttaggcatggttcattttaaaccacccctaatcttccagatttccagaggacaagatttcactatgtttttcaatagattatttagcattttatattcatatattgcctgttaatctctctgggatgaaaaaaaaacagaagtgtgcttatgtcttcttaaagttattctattcttgatttagtatttctcaagactgtgcagtaaaggtactcaatccttttcccatgtaaccattaaaaataaaattatgttctttctttcattaaattaccaacgagtaaagtaagtagcgtctcacttgatgtttccctgtgagtatgttctcataaatatcctcagttcagtgagagattctgactgtaatacagaaacaaaaaaccaagcaggtttgctctgattcttgatctggattttggtatcacaggtatgctgaactgctctaattcttgatctatatgttagcaatgtgggtacattctatttgtaaaaaatcctttttagtacaacttgtgatatatgcttttctgtatatacgttatacttcaataaagaaaaaaatcctacagtctgtgaaagctcaaacttatctatggtatgcccactctctgaagtgttaattattctcacaggaaagactcacatattatgttgtgtggcatgacttatgttcatagttacccaccaccactctgttctgtttatgattaaaacagcagtatgtattgatttttaaaaaattcaaacactaaaagtagtctataatctcatcccctagaaataccaaagttagaatttaaattcagaggcttataaagtccacactactcattattaaaaaactgtacccttgaccagactttgtacatgttacttttcctccaaaaattctcaaaaataaagcaatattgtttagaatcctagaataccagtaactgaactaaacaggcttgaacacaagcaattttcaacagtaaatttctactacttcctctataattttcagagctcgtgtcttttctatatcctcacaatatctacctcaatgcaaggcgtatagcagatgtgtatcgatagaaataaagttctctaaaagaaataagaatagtcactttcagatgatacagtaatgtcttgatttcaatttctaggaaaagcgggcatggcaccctctgaaaagtactctatttattttgtttattgatctatgtatttatttttgctactttcactgaactcccagattctgagttttctcctaactactcctttttttacaaagcagaagcttttgtataaaagacttatccaactcaatcatagcaatacagtgtctatcaacttcccctacttctctccttttctatcctctctgtctatacagcaatacaagaaaagcacgaagaaacaagttatctcttagccattacatttttaaaatataaaaaaatttaaaactacgtttacatgaagattaagattctaatataactaaagccttaattttttcactgtcatttctatatgctgatataaatgaaaagatgtaagtttagcatgcaacagtttcaaaagaaaccaactgtatatcaatctacaaacctgatgattaacaaagtattgcccaactatgaagatttaaagagcataacagaagtacttcatataaatgttttattattactacataggaaatataacctttctttaaataaagctttatcaatagcttatatgctataaatagactacctagaatattctttttgcctatacaatgctataagcaataactacacctgtgtagactttagattatctttaacaatgggacaaaaaaaatcaaattaaattgaaataaaaatttgtacttttaaatcatctcaatagcctgtcaattttttttaaattattctgttgaaatttaagaccagacatttaaattttcaaacatgacactcctactttaaataaagttcccaaatactttaaagaattctgctttgttttaagtgccaagctttaagaaaagcaattcataataaattcctatatgagatagtctggagagctcaaagacaccattctattgataatattccacttgattcttgggctctacttggaaatcattaaatcgcatatttgctagaggtaaattttaacaaatatatctcgctaacagataactgttatccatatgcatatgaatatctttaactattttagctagttacttactgagagccatgcaagggactccatgattcgatgttcacatcgttctaaatgtttaatcatttctctggtcaggttggcttctgctttgatgaaactttcaatcactttgtaaaaatcaaaagcttttaagttaaatacattcagaatccatgggaaggatagatctgtcccagtatccaggctctgagacatacttcctaaaaatgaagagaaacataacttaggaatgaaacagaaagtcttgaattacattatttttcagttcaaaggttttattaaacaaaaaattaaaacacactagaaagactaaacaaaaaaagtttatttaaaacagaatttcttattctggagtccacagactcctaggaaataggcttcccaagtctgagggcatatgcatgtctgtctcttttagacagaaggctcatagcttatatcaaattttcaaaggtttaaatattctaaacttgtatcagggacaggcttaacatccaaccagtaatgcactggcatatccattttaactgtctcattaatcgttgataaagaggggaagtgattgtttagattttgataatttggttagaaaaatctgtttcaattgtgcatttcttggttatattagttatgtaatatatttgtatccttagaaaatttttttcttttgttttttacaaacaaaacttttttgacagtcacaagattatttgcaaagtaataatacatgttgaaaattgtattttaaaaaaccactattggtgcctctgttccatttatctggcagatttcagttccaaccttcggtctcataaccactgaatatatatatgtagcagtgcttccttatcagtggaagctgctcaatagtacttctcagggattttacaatctcctaagtctttaaaagggggttaataagtacatttcctggattcagtatagaccaaaatggagaccttgtgaaagtattcccaagatgatttgaaataatccaagttcacaagccgttctaacgtgaccaattacattctttcgtatataatgatctaaatatgcatttcttctccttaatttctccatctcctaccctcctaaaaaacccacacaacacctcagataagttttttaaaactttaaattgaactagaatgtttatttactaaaatttaacttactgctataggtagccattacaacctcaagagcgcatgccaacaaagacatatgaaagatgttgtcattcaggagtttgctaaaggaaaaaaagaatgatttttgtaacatttacttttataaaaaaaaaaaaaagaaattgttttactaaaacaaaaatttacctaaaattttgaatggataatcgttcttcttcctaaaacagatttaaaaaattaactgaagccttctttgcattagcaattaatttttttttctattatattcttttaaacttactgatttaagcatggattccattactcggtaatacaatcggactccaagtttgtatcgctacaaagaaacaaatttaaaaaaatcagatcccactattttagaaaacataacaattactaatttttaaaaagtttagccctgagacacatctctgacccttcttagaaatatggctaccaagagagcacaaaagctagcttgtctaaaactgaggaaactgaaagtgctgctcactcagttgagcccaactctctgcgaccccatataaaatgacggttttcacattcctgataaattttcaagaggaggggtccagtatatggttttcctacattcctacttcagtctacatcgtaacagatatatatgtactaagaatatattatatgttagtgttagttgctcagccatgtccaactctctacgaccccatggactgtagcccatcaggctcctctgtccatgggattctacaggcaagaatactggagtgggttgccaatcccttctcgaggggatcttcccaacccagggactgaaactgggtccactgtattgcacactgattctttaccatctgagccagtggggaacctagtactgttctaaccattttacacatgaatgcaacacttctatgacctagtacatgtatttaagatagctctccaggattaagagaatagtacctttccataaagctggcaaaggcaaaaattagatctaaaggatcttatcagcaaaaagttttaattaaataactagtttccattagtttaaaaaacagtccaattttaaataaacacaaatatacaccataatccttcattccaaattatggccaaaagaacttttaaatataattgtttaaaatacagatggtatcaaaatataacctcattacactaaagtaaatgtgtatagtagattacagttttcaaatatattttatatattacctcagtaatgccacaaagtaaagaaaatatagaaacctgacagctcatatatgaaagagccagatatgaaaccagggctcgaatccagagcccattctcttgccaaatattagttttagattttctgaaataataacagcaatagtaaaagtaacatcattcaataataccactaataaatggcatgtataatattccattcatttaagtatgtgcatacataatattccatatgtgtaaaagttaaagaatatacaacaaaaacttaatatcaacaagattttgatttttttttacttgtactttctaaaatttacataagttttctaaaattttctacatgtttctttttggtttctgtaatagagtaaggaaagctagctcataaagttttttccaaatagcatcatacacagccgactaggatatggtatatggtagctgccaaaattttatactattagatagcatttacacaacttggacagatactgcatttgaaattatttactacacagtggtactcatcaaaatgagttcaagttacctgtgatccaatttccatacatccttgtcccacagctttagcaaatttctctttaaagatgtccccaatatccttcactcttttcaggatactttcctttggattcactgtacaattctttaagaaggaaaaatagaaattaagatagaggatactgtctaaccagagaattaacactttctgttctataatagcatgacttattaatttcaattgtttatactgtaaaaacacttcacaataaataagtaaatacaactactgaaaatatgagaaatataaagcattccattctgggatgatagggaccagaaactactagactacaactaaaaaatcgctattatctaaattttctgctggcaagttaggaaagatttgttagcccttcccttagccatcaaaaaacagcctcatagattttacaactgataccaaagaaaaagagctattcataaaagacacaaatgaaagtactgcatgctcaaggaaattaatattgttaaaatattcatactactcaaagcaatctacagattcaaaaaattcccgtcaaaatttcaaggtatttaacagagtagagcagctgtatgtagaaccacagaaggccccaaacagccaaagcaatcttgagaaagaagaacaaagctggaggcatcaaactatactgcaaagcagtaatcaaaacagtttgctttggtataaaaacatagatcaatggaagagaactgagagctccaaaataaacccatgcatgtgatcaattaattaccacaaaagagtcaataatacaaaatattaagtaaggaatgggacaatttctttaataactgtgctgcaaaaactggataaccagtttcaaaaaactgaaattataccactatcttactctacacacaaaaattaacacaaaatgaattaaagacttgaacataagacctgaaaccatgaaactcttggaagaaaacatggatggtaaactccctgtcgttagtcttggagatattttggaattgactccccagaaaaaggtaacaaaagcaaaataaacaagtggaactatttcaaagcaaaaagcttctgtaaaggaaaggaaactatcaacaaaagaaaaggccaccttggatcatggaaaaagcaagagagttccagaaaaacatctattttgctttattgactatgccaaagcctttgactgtgtggatcacagtaaactgtggaaaattctgaaagagatgggaataccagagcacctaacctgcctcttgagaaatctgtatgcaggtcaggaagcaacagttagaactggacatggaacaacagactggttccaaataggaaaaggagtacgtcaaggctgtatattgtcaccctgcttatttaacttatatgcagagtacatcatgagaaacgctggactggaagaaacacaagctggaatcaagactgccgggagaaatatcaataacctccgatatgcagatgacaccacccttatggcagaaagtgaagaggagccaaaaagcctcttgatgaaagtgaaagaggagagtgaaaaagttggcttaaagctcaacattcagaaaatgaagatcatggcatccagtcccatcacttcatgggaaatagatggggaaacagtggaaacagtgtcagactgtatttttttgggctccaaaatcactgcagatggtgactgcagccatgaaattaaaagacccttactccttggaagaaaagttatgaccaacctagatagtatattcaagagcagagatattactttgccgactaaggtctgtctagtcaaggctatggtttttcctgtggttatgtatggatgtgagagttgggactgtgaagaaggctgagtgccgaagaattgatgcatttgaactgtggtgttggagaagactcttgagggtcccttggactgcaaggagatccaaccagtccattctgaaggagatcagccctgggatttctttggaaggaatgatgctaaagctgaagctccagtactttggacacctcatgcaaagagctgactcactggaaaagactctgatactgggagagatcgggggcaggaggagaagggaacgaccgaggatgagatggctggatggcatcacggactcaatggacgtgagtctgagtgaactccgggagatggtgatggacagtgtggcctggcgtgctgcgattcatggggtcgcaaagagtcggacatgactgagtgactgaactgaactgaactgaactgaacaggataagagaagatatttgcaaatgatgtatctgataaacagttaataccaaacatacaaaaaactcatacaactcaatatcaaacaaacaaaacaaaaaactagctgattaaaaaagaggctgagaactgaatatacatctttccaaagaagatatacaaatggccaacaatcacaagagaagatgcttaacaactctaatcattccctggaggagggcatggtaacccactccagtatttgtgcctggagaatatcatggacacaggagcctggagggctacagtccaaggggtctcaaagagaaatggctaatcatcagagaaatgcaaatcaaaaccataatgggatatcgcctcacacctgtttaatggttattatcgaaaagggaacaaataataagtgttggtgaggatgtagagaacaggtaacccttgtacactactggtagaaacctaaattggtgcaaccactatagaaaacaaattggagactcatcaaaaaattaaaaacagaaataccataaaatccagcaacttcacttctgggtatttatatgatgaaaatgaaaacactaatttgaaaaaatattatgtacccttgtgttcactgcagcattatttacagtaaccaagaatgaaagcaacctaggtgcccatcaatagatgaataaagatgtggtatacaggtattccaaatagggaaaggagtacgtcaaggctgtatattgtcaccctgcttatttaacttctatgcagagtacatcgtgagaaacgctggactggaagaaacacaagctggaatcaagattgccgggagaaatatcaataacctcagacatgcagatgacatcaaccttatgacagaaagcaaagaaagagactcttgatgaaagtgaaagaggagagtgaaaaagttggcttaaagctcaacattcagaaaacgaagatcatggcatccggtcccatcacttcatggcaaataaatggggaaacaggagaaacagtgacagactattttcctgggctccaaaatcactgtagagcgtgactgcagccatgaaattaaaagacgcttgttccttggaagaaaagttatgaccaaactaaacagcatattaaaaagcagagacattactttgccaacaaaggtccgtctagtcaaaaatgtggtttttccattagtcatgcatggatgtaagagttggactataaagaaagctgagcactgaagaactgacgcttttgaactgtggtgttagagaagactcttgagagtcccgtggactccaaggaggtccaaccagtccatcctaaaggaaatcagtcctaaatattcattggaagggctgatgctgaagctgaactccagtactttggccacctgatgtgaagaactgactcattggaaaagaccctgatgctgggaaagattgaaggcaggagaagggggtgacagagaatgagatggttggatggcatcactgacttgatggacatgagtttgagtaagctctgggagttggtaaaggacagtgaagcctggcatgctgcagtccatggggtcgcaaagtgtcagacacaactgagcaactagactgaactgaactgaactgacacaggtgtatgggcttccctggtagctcagctggtaaaagaacccacctgtaatacaggggaccccggttcgattcctggatggggaagatcccctggagaagtgataggctacccaattcagtatatttggacttccctggtggctcagatggtaaagaatctgcctgctggagaatccccttggatagaggagtctggcgagctacagtccatggggtcacaaagagtcagacatgactgagcaactaagcatagcacagaacatataagtatatatatatatatatatatatatacacacaatggaatattatttggtggtagtttagtcactaagttgtgtccaactcttgcaaccccatggactgtagcctcccaggttcttctgtccatgggattctccatgcaagaatactggagtgggttgccatttccttctccaggggatcttcctgacccagaaatcaaacccgggtctcctatattgcaggcagattctttaccgactgagctatgagggataacccattccctatgaggggatattatttggccataaagaaaaaagaaatcttaccatttgtgacaacaagtatggatgtagagaatattatgctaaatgaagtagatcagacaaagaaagcaaatattatatgatttcacttataaatctaaaaaacaaaacaaatgaacaaatgtaacaaaacagaaacaatcatagacatagagaacaaacagaagggagggtgtgggtaaagagagaaacaggcgaggaagattaagattaaacttcgagttacaaaatacatgagttatgggtatgaaatgtacagtgtggggtatacagccaataattatgtaatatctttgtatggaaacaaaaggtaactagatttactgtggtgatcattctgagatgtacagaaatactgaatcactatactgtgtaccagaaactaaccaagtcttgcaggtcaattatacttcaaagacaaacaaactcatagaaaaaagatcacatttgtagttactaaaggcagggacggtgggagggggaactggatgaaggcagacaaaaggtacaaacttccagttataagataaataagcactagggatgtaacacacaatatgatgaatataattaacactgctgtatgttatacatgaaagttgttaagagagtaaattcaagagttctcattacaaggaaaagaattttcttcagtttcttttattttgtatccaaatgaaatgatggatgttaactaaacttattgaggtcatcatttcatgatgtatgtaagtcaaatcactatgctgtatgtgtaaacttgtacagagcaatatgtcaatcatatctcaataaaactggtaagaaaaaaatgtctatagcttctaatattttacttacacaagtaaggaaagatggcactgatttttaaaatgaagaaactgagaaacaaattcagagaaaaacttaatgattttcaagatatgccccctctgagacaggcaatttgtagtgtatgcaaaactttgcagtcaaactgttacgctccatttaatgttaaactttaaactaagttctggaaaatatctctgaggcagaattttgtgctcaatagaaatagtttaaaataaaaaagaggtcctatatactttaaatgctggaggaaataccaaaaacaatatttaagaaaacagagattatcattctttttacttatatcattatcccttctaaaagttctaagtaactgagtacctatgtttgggaactattcttgtgctacaaattacccagaaataaaaacaactttatgcaaattggacaaagaaaatcagttcagagccaacacagttatgaatatgatgacagaaaaatacttcgttaatccctgggggggaatataagcaagaagacaacaaagacaacgacaaaaccacaggcagcttatgatattaaacagaatgttaaccaaacaaagcacacagttactggataagccaaactttaataagtcttcaagcctcatccagcttccacagaggagcctttcagtcagtcccaagcctcatctaattttaaaggaggaaaggaacaagcgtgtaatacagacactagctttcattctctttctttctcactccctttttttaagaggagggagggtagcaggtgcctttcagatatcaaactcagggtctatcaggagtatatactgtaatgcacacagggccatacagtaaaaataaataaaaatgggctaaataaaaaagactgcagagatatgacaaatattaaatcctatctaatgtcacattcaaaggaagtatcttaacagctgctaagtcgcttcagtcacgtctgactctgtgcaaccccatagacggcagcccaccaggctcccccgtccctgggattctccaggcaagaacactggactgggttgccatttccttctccaatgcatgaaatgaaagtaaaagtgaagttactcagtcgtgtctgactcttagtgaccccatggactgcagcctaccagggtcctccgcccatgggattttccaggcaagagtactggagtggggtgccattgccttctccgatcttaacagcagccagagggaaaagacagattaactgtaaagaaacaacatctaaattgacagaaaacatcttactagcaacaatgagagtcaggaagtagtaaagtaataccttcaaactactaagggaaagtaaaggtcaacctaaaatagaagatccatgtaaaccgcctcacaaaaaataagaataaagttattttaagacaagaaataaaacacaaagcttgtaaactcatatcaaactaactctcactaaaggaattattaaaagatgtatggggcatggaaactcaagagggaggtgatatacatatagttatgactgactcacattgttgtttggcagaaataacacaacattgtaaagcaattatcctccaattaaaaaaaaaagatgtatctgaagaaagaagaaaataaaaatggaagagaggtctaagctgcaagaaagaacagtgagcaagacaaacagtacacatgagaaaatctgaaaataacattgtccaaataaaacaatagtactactgatatctaatttggagagttaaaaagaaaagcaagaaataagataatagacaacttattgggaaatgggtgtttataaaaacagtattttaacttctaatttcaaatttttttgccaagatatcataataaagtgtttcacatatggcttacattaaaataggaaatcagattttccgatggttgatcacttgctgaatttaagatcatcattaattgttggatagtattcataacagtcctataaaaaaatatgaagaaatgttacgaagtgaagtaacaaaaagaacaaatgacttgcatctatgtcataagttacacttatcttcaatctcattgtctcttgttaatctttaagaaggtctctgaaataagactttacaaatcccttagtgtactgttgtttataaggaattaacattttaattagatctttaagaactgatatgttcataatatgcttataattaaaaaacatatgcttacttactaataaaactataaatcaataaaacaattgataaaagtaatgacattgttttaaggacaaaagggcatcaaaatggtaatattttaagcaaacattattacaattaaatattaaaactagtcaaataaagactaagatatttaataacaagtaaagaaccaagtgactctcttttacagagatcttcaagatgaaggcatacctgattttagaagtcatcattactaaaatgtaaatgtaggtcaatctcttataattttgtgtgtattggggggtacatggtaaatattaataatccaattttggagtagaagtacattgctactccgtatgcaccgtttaaagatgcaaaaagctggtgaatgtttatggccgaaaggttccttaaacattatttaataatccatgtttggttttcagccaagcctctcgaaactgacagctacaattcctcgacttttaaacatactgcttctatgacatgttgtactaattccttaagccacaatgactaaagtcgtaagtgaccaactgctaaaaccaaaagatctttcttgttcggtctgatacttggttttcttgagacatgtcacactctaaaacacttgctcttttctgaaactccctccctcccttggcttctttggctccactctctggcctccccagtcacacctctcattctttttaatctaacttctatctagaccttaaattccagcactctcagtgttcagtccttagtcatccatccttgctattataaccctcacttcagaaaacctcatctgtttttctggttttaactctccctgatgactcccaaatctattatgtaagatccttatatcctactacttattacattatcttcttcatgtcccataaatttattaagaataaaattctaaatttgaattcatcaactgtttatcaaatctcttcttgttctttcattcccactacctatcttttggtttagatcttcagcatctctcaagtgaattactgcaatgcaggattttgacagggattttgactcactatgtctatggcagcaggatcaaggcataccgtactttggggaaaaaaaaactcctcagcttatctaatttgcacccatggttaagaaccagattgataggtctctatttctcaccacaccccaccctcctcagtccctctcttcacagttgactatcatgtaaattttcaaaaccaagtctgattttatcctacccctgcttaacccatgtatagcaacagactatatcgtgcacaagcagaagtccaaacttctgagtttggaataataataaggcccttcatgacctagtacccaccctcctcctctgccatttcatcttcccatttagtctgtcagtacaaagttgcttacagttcccctgacacattgggctgtttcatatgtctgttcctctgcacgtgctgttggtcttctgtgacacaaacttacacgtttcaaaattcagttcaaacatcacttcataaagtcccttctgtgccaagtctaagtctattactgcattcaaacaagaatgcatttttatacgtgtatgtagtcatttgaaaaaaattaatgattggtaactctgtatcaagtattatcttaggtcctaattatttaatttaatggggaacaaaaaagtcatggtccattgcagtataaacttaaaggttattatgggtattgacagaaacaagtaaatacacagattaattcataattataaattgtgatacatactatgaagggaagaatgggatgctgtgaaaaacaataatttcagagagaaagacatctgcattatatatttgtatatacacgtaacaggtatatattgagtgctctttgtgtgccagatgtactgctaattgccaacgatatgattattaaacataggtctgtctgcccttaaggagtataacctagaatgagaaggtgttccattttagtaaataaaaaagagaaaagtgttatcatttgctctgtatatatcccagaaggactagaacagtttttaatgtcttttcctcacaaatgattaaacctgaagcactataaagtactgattaaataattttaatgaaaatcaaaagtaagaaaagtcatacctaactggagtctgtggaagaatcatattcacctcttcatcagggttactttttcgtggtgttctttgcatttcaaaactaaatagtgataagcaaagtaattcagactcaaaatttacaacttgggcttcatgagtcaaaaaagcagtataatatctttctgttgcctcatgacatcatacaaaatggttaagtaaataacagaagttaaaggaaatagatgatccaaaagctgcttacacaaataaaatttattttttttcatcatctttttaaagttaagtttctttccactaggtttacaaacaggtgtgcaatcattaagaatttttctgaaagtgaaagttagatgcttgttttctctagaatgttacgttgatgatatcactagccaagttgttcagtattaaaaaacatcagcgctcaagtttttcaatcattatggtttccaaaatttactttcacttaaataaaattagaaacactttacctgtgtttaattttccaaattatatatacatatatgtattttagctaatattaaacgatttcatgcttaatgacataaaattaatcatacaatcattcaaaatttttgtacaagcatatctcattttactgcactttgctttactgtgattcgcagaattggttttttaaaacattgaaggcttgtaatcctgcattgtcagatgacagttaccatttttagcaatacggtgttcttaaattaagatatgtacatcatttttttggatataaatctattgcacatttaatagactatagtacaatgtaagtgtaactcttacatgcactgggaaactaaaaatatttgtgtgacttgctttattatgatatttgctttattgcaatgatgtagaatggaacccataagatctcataggtttgtctgcagttatcttaaccattcctattttaggattctatacaacaatttaagagaatatactttggtattattacattttaaaaaatgaaccagcatatcaacaaataataatacatcatgtgtaatacctgtctgcaggatcagcctgaagagttttatcatgatccagaaataatcttgcatctagatctttgtttttaaggtaaatttcttcatattgtttagagagattttccacctcaaaaaccaaaaaatattgatgattatccttttcatgccattatatctcagtatacatatttaaacaatttttgtacctaggatatcacctagttctacattacatagacttcacatgcaatataaacaaaggcatatatctaaaagtgaagtattttagtgcaaaaattgcatactttcttcaactgtaattttaaatcttgttttatggatatatcccaaactttatctaaacaagaatcaccaatgctacaaaacaatactgagatggaaatgtagataaaaatagatataaaaccacttaattgccaagatccaccattctatacatctttcacttttaatcttctactctacttaccaatataaaataatttttcaaaaactaacaaatcttgcctatcttttctaaatcctttggttactcacactttctttagtaacatatcttgggcatataatctcaattaattagcttaattaacatacttgcacaatttatctccaatgtcagacagttttccaaatgctagaatcaattattcttttatcagccctgggttcctaattttccaatcataatataaaaccaatgccttgtagacagttatttaacatgccttctcctgtgactttctaatctgagagcgctaaaaaccaatgcctgatagacaattatttcacatgacttctcctgtgactttctaatctgagagcgctaaaatcacattctaaaaggagtagtaggaagaaattcatttaaatgtaaactttgtgcttgcctgcataagttttttaggcaaagcaggcataactatttgtttactcattgttcctgccctgtattagtgaggcactaaatatcaacaggttattgactagtagctgttagtgctacataatgtaaagtgtatcttgaattttctaaccttgtgatcctttcaaagggaaaaaaattacaaatgcctaagattctttagagttgtaaataccttattttttgatatgtaagttggtgacaggactcagtaatacatcatccggctccttctggcttctttagtgccatgtcttaccagtccctgctctgtatcccaaccttaaggagttagttggagttcactgaacagacgatactatcacatatcactgtgcccttgaatctataatttccaactcctggaaatgctacttctcataaatcctactccactcagaaatcacatcatctccaaagaattttgtgcaaaatctacctggcccgatttgaattaggtacccctcctctgagatgtcaccacaccctgtgtacacatctattaaactcttgtagactcctactagtaatgttctatgtacatctgtctcttccactagcatcataaggacaaggactgtgagttaaatctctacaatgacgacatgtagcacgatgcctggcacatgttaagcactcactgagtaactgctgaataagtaagttaattcagggactagctaccaactcaggtcacagaatcagcaatctagctctctgatttcatgtcttttggacttggtgactgatgctcagtcagttcagttcagtcattcagtcgtgtccgactctttgcaaccccatgaatcgcagcacgccaggcctcccagtccatcaccaactcctggagttcattcaaactcacgtccattgagtcggtgatgccatccagccatctcatcctctgtcatccccttctcctcctggccccaatcccttccagcatcagagtcttttccaatgagtcaactcttccaatgacgtggccaaagtactggagtttcagcttcagcatcattccttccaaagaaatcccagggctgatctccttcagaatggactggttggatctccttgcagtccaagggactctcaagagtcttctccaacaccacaggtcaaaagcatcaattcttcagcgctcagctttcttcacagtccaaccctcacatccatacatgactactggaaaaaccatagccttgactagctagacctttgttggcaaagtaatgtctctgctttgtaatatgctatctaggttactcataactttccttccaaggagtaagcttcttttaatttcatggctgtagtcaccatctgcagtgattttggagcccaaaaaaataaagtttctgacactgtttccactgcttccccatctacttcccatgaagtgatgggaccagatgccatgatcttcgttttctgaatgttgagctttaagccaactttttcactctcctctttcactttcatcaagaagctttttagttcctcttcactttctgccataagggtggtgtcatctgcatatctgaggttattgatatttctcccggtaatctggacctccctgctggctcagacggtaaagcgtctgtctacaatgcgggagaccgggttcgattcctgggtcaggatgatcccctggagaaggaaatggcaatccactccagtactattgcctggaaaatcccatggacagaggagcctgttaggctacagtccatggggtcgcaaagagtcggacatgactgagcgacttcacttcacttcactttaatcttgactccagcttatgcttcttccagcccagcgtttctcatgatacactcagcaaatctggaaaactcagcagtggccacaggactggaaaaggtcagttttcattccaatcccaaagaaaggcaatgccaaagaatgctcaaactactgcacaattgcactcatctcacatgctagtaaagtaacgctcaaaattctccaagccaggcttcagcaatacgtgaaccatgaacttcctgatgttcaagctggttttagaaaaggcagaggaaccagggatcaaattgccaacatccgctggatcatgcaaaaagcaagagagttccagaaaaacatctatttctgctttattgactattccaaagcctttgactatgtggatcacaatcaactgtggaaaattctgaaagagatgggaataccagaccacctgacctgcctcttgagaaacctatctgcaggtgactgatgctaggtgtgtctaaaacactgcttcaccattgagaacttgctcttcatcatttaggcatccttttccccacaagttaccacataaagttctcagctgttctgttctcactgaagagcaagacatttgaggcaaaatgtgaaaagaaatagatggatggcatatcagtaagttaaaacatgtctacaatataatcacagtcatttcaaccaaagctatttccaattaagtagccaaaagagaaaattccctggcagtccagtagttaagccttggtactttcaccactggggcccagatctgatccctagttggggaactaagatcctgcaagctgcatggtacagacaagaagaaaaaaaaaatactcaaaaggatgttccaaaagtcagtaatgccaataatgttgatggcattaatcaaggcttctatgcttaaagaagcataataaagaaaatcagaataaattagattgcagaaatttaaatatttaaggcatttagaagttcaaaagcctatattttgatttttgaaaaatttcagtacaaatcaatgtctagtgcaaatgttatttatatatacatttgagcatatattacaaagggtttttctgttactatataaaattgattcaccacaattctacttagattctttccttgagtgaaaaatatttaatatatagtaaagtaatatgaaatttagacaactcttcttccctccccaaaatcccgaaacatattaactttttattacattttcgttcagattacctctggaagtccattagaagctacaattccaagagaattcataaaaggtataaaatttttgaaataaacatttttcacctgaaaaagataaagttacaacatgaccattgaaattaaaaaaaactggttttttaactgctcttgactggttttttgactgttgctattaataccagaatgagtgaactgacattttgatcaataagttacattcaactcagtgtgatgtttatttatgattaatacaattattcactttaaatttatgtgaggcagatttcaggtcctaaaatggaggtgcaggggccagttgttaatgaaatgagatttacaagaagaaaattcattgaaaccaacttcaaaatcccatatttaacaagtggtgaaaagatcagagggtcaaaaaaattaagcaacctgagcaaagttacatagctaggaagcgacagagctggaattgaaacccaatctgcctagcatcaaagccaaggctctttaacttctctgcactgcctctgatttctccccagagagtatttttgggccatttcatacacatattataaaacttaatgtatactgagtcaattattttagcacaaatttaggaaaaggatcagcttttataagaaaataatttcacatacatatacctgatccacacttaggatgacaatttacaaagcatagaagagatgctcagaccctgttgtcagctacgccatgggaagaaagcagtcactgctcacacttctctaaagaagtttctcacaaagaaacaaaacattgcatttctctacactttaaattacagtgtgctaagtaaatattggagaaggcaatggcaccccactccagtactcttgcctggaaaatcccatggacggaggagcctggtaggctgcagtccatggggtcgctaagagtcagacacgactgagcgacttcactttcacgcattggagaaggaaatggcaccccactccagtgttcttgcctggagaatcccagggacgggggagcctggtgggctgccgtctatggggtcgcacagagtcggacacgactgaagcgacttagcagcagcagcatacctaacaaaactcttcaaaactgaatgaaaacgctttgtttgggacttacgcagtttcatacaaaccgcccccctacatttaacatggataataaagaccatatttggaaaacctggaattatatctctgactattctatactgacaaactgtcatagaattgtaagcaacttacttttcttcatataacttccttttccaactttggagtctacatttgttaaggtagaaataatttaatatatgcctattaataagttcctattttctacttcacaaataagctataagaattaaacttctataatacttagtattgttttccaattaattcccacttaactggaataattataagatgggtagttctatctaaccaattagtatgactaaccaataatgatatgaccataaatataactaagcaacagttatataatcttaaatgctatatgcaaataatattacatattttaatatataaagtatcaaattaattaatataaattaccaaagctattgatcacctacactttataagtcactgttacatcataaattatgaaagaattatttaaaaggaaaacatgatttattcctgatttttggcaagcaattatataaggagttctgaaatccagagatttaaccaccaggaattagaaagctgcctttatttatgttctttatcttaaaggactaagcagcagactagagttaaaaagaaaaaatttcaactacatttgtcaccttattagtgaagataatatgttattctagaaaagtaaaagagtatatgtgtaaagttgatacatctacatgtctatatctatatatttgatgaaattaacaaaactcatagtgccaaaattcagacttgataaatcattccaatacttattaaactagattttgatatcatacccccattctttcccagagttgacagagaaatttcaaagatgcaacatttcatacagtgaattgtggacaatataacaatctatgagagaaagagcgtggcacagtgaaagcagcactggtagcagatgttcagaagcacaccacactttgttagtaatcagctatcagtctctagaagcttgtctgctcattagtaaaaggaggccaagtacattaattctaagattccttccagttctaacattccagattttattaacaagataagcaattcctgggtgttcaatgtatcctctaccagtcattaacatctggtgtgatacttagaaacagagtaattatacaagactgaacagaaatttgggcttccctggtggctagcaataaagaatctgcctgccagtgcaggagacacaggtttgatccctaagttgggaagatccctgaagaagggaatggcaacccactccagtattcttgcctggagaatcccatggacagaggagcctagtgggctacagtccacagggttgcaaagagttggatacaacttagcgacttaacaacaaacagaaacttaatcttggtatcacttatcactaaaatcaagacaatagggttttcttagtagcttactctaaaacatcaggagtatcaataaccacagaagaattaaagaacaaatatatttgaaaactactgccttaatcatgtacatttcagtgattccagaataagggagctattctctttaaaatcaaagtaactgaatatgaaaattaaactttttctaaatattttgctactgcaaaagagttggcactaattacaaaaaagcaagctcatcatgaaagaattatatattgttaggaagaacttacatctaaatctactgtaactattttaaagaaatcatgaagttaaattacctcatctatattacattcatgttctttacagagaacttcaataattcttgtatcattttctagttgttttgctatccgtgcactcctgttctgacctcgccttggtgttcgaggtgaaccattaataggtattacagctgtttctgtaaaaatggtaaattagataagaacaattgcatattccactgtataaaataatgaagtattctaattataacttggaaggttggaaataatcttggtaacattctgctacttttacttattaggcttcatgaaaaagctaacagcttcatctatttactgaatatctattgtaaattatatactggtaatagtttttgccatccctattctcttctgcccccagctggtccaaaaagaaacctaaaactccatagacaaatatgaaaaaggcaagggaaatagccaacttataaactaattttaagtgtattctactcagttggtaaggcgggaaaaatgtttcctatcttaaaagaatcttaagaatgttaagcattatttatggattcactttcaaggtaaagtataaaaataagttttaaaaattttagcaaatgccatataaattatgatgattaaaaaaaataagcatacaaatataataatgtgacactaaattgtgattttagaaaaaaaatcccctggattaatttgagcattttcaattcaaactgaatgtggattaagctattaaagagattatagatgactaagtataaaaaatattaactgcctctaggcccaaaaagaaactgagaggatagaggaacatgttagactataccataggatgcaatcagtaaaaattaaaccatggaaaagtcaacagaaaagaccacctgattatttaataaataaattacaagaaaaaaaagagaaagatagatggaggaggaatattttaagtcttaaagtcgtatcaatcaatcataaagtatagatgttatttagattctgatttagtcaacctataaacatttttaattacttttataaaacaattgaaaacataggcacctactagatatttggtggaattaaggaatcactatattaactggtttttaggtatgagaatggtattgtcattatgcttttcaaaaagactttatctttcagggatatatattgaaatttataaggatgaaatggtatgcaaaaatgtgcttcaaaataatattgctggtagaactgggcagtagataggactatgagttgatcaaaagttatacactgagggcaggtgataaatacatgggggcttattatatgatttaattatgttcacagaaattcttcttaataaaaagctaattaaaagtttaccatagacatcagttcgataccttatccttgtttctcctttaacatggcacttgaagaattaactgaatatctgaattatctgaatatctgaattatccaaaagcacaaaagttgccaacctaaaattacactcttcatcaacttattacagttataacatattttaaaagtgaggaaaaggcatataaaggaaatttttaaagattcgggaagtttttgaatatattgttttgtatttttttcattttgcatgtggtttctgctaaatgacctgccttttctgtcaaatcatgtacaacacattttcaaaattctgctccagacttcatttttctatgaagttattgctcatgtagattaagtaggcttcagcttttcagtcacttcgacaatactttgagacttacatgttttgatctgtcctctattatttttagtattattaatattttatcattttaggagcaaggaatcagttaagcctaagttaagttcacatttttctgtagtataacaagtgtttttttaaatcctactctatatgccaccaaaagaagcaatttcattctaagaggagtatacttatttttgcttaatgctatctaattattccagtaatagttattatttaactacactttccatctcattaccctctgaagtggatcaattacagttcacatgccagaaaacaaaaatcagtcacataatcattatggcatccaataaaaaaatgtagttaatctgttcctgtaggatgggccaccctttcccatacagtttagttcatgtctgttccttgcctattgatttttcctttactgggtatgccctccctgaacttaccacaaccctcaaaccccaactaccacttcaacactcagctcaaatgccaccacttcaaatggtcttccttggtctttctcagctgggaaaactttctcatctcctaaactcccatagtatttgctgtattttggcccagaccactttcaaccatatactctaaaaacctgcttacttgtctaatctcttcttccatatcttatgctacttaagagcagaggctatgtctgacttcttttttattattcctttggctctagaactatgttttggatctaggagaagtcaataaacaactttgaatgatgaagtaggaggggtataaattaaaatactcactatatggttctttgagcaatgcaggaggtgagagtttgataaaatagtcaaggacacacagcattaattgaaatgagatcaccagatcatcttccatttgtaatacttgtcctgaaaacaaaaatggtccacattttaaggtagagattgagatattaagtcaggaaaaattgtggacatgagtgtatccatatactcatgattgaacaatcactaggagcatgtcaaaaatcattttctatatccctaggtatggtgcaaaaatttgtttataatacacttagaagttgttaagaaatgccacagaggtaaagaatatgaagaaaatagtagagtgaggtcagatcaaaaaatctctcttccaatacctaacaaaatgaaaagaaaaatatgtactggttaagttccaataacaatactaaatttgagagataatgactcagagcatccttatctttcccctctttttactttacttttcactgatgagagaggggaaaatggaggaagtaaacagctacatcaactctgacaaacacaaagactccagtataatatgctgaattaggggacaatctgaatcctaacatactccttttatgcaaacaggacaagtacctgttttacaggtcattctaacaaaaacctcagaacaatgactcatatcattccagataaggtcctgactttctccctcatcctttaaaagtaagtataattttttaaaaaaagactgctttcatacaatagctctttggagaacacaacaagtcacagataaagtacaaagtgagtgaagggaaatgcattcacactacatcaaagaaaacagaacatcaggtcagagaggcccaaataaagtcctagcaacaaggtggatggaaagagagtgggaagcacagtagttatgcaaacatattagagaaaataaaaaagaaaattaaaaaacagaatcacgatataagaagggggaaaactgggtagagaaccccatcttgaagatagaaagaaagaagaaaatgtcctgagtccttgcactgagaactcaaaagaacacgaattacataaaacaaggagctagacaaggtaaggaaaaactcaaggccaagtaacaattacaaacatagtttagctcaaaacagaagtaaagtttgaaataaaaatagttagtacataagaaaaagaccaaaggttaaaataacattacagaagacaataaatagggcggacaaaatcaatctaaggtaagacagtggatgttctcaaaatgtaacagaataatatcttaaaatgtagcatgctaagatttctctgaaatgaagagcagaatcttcaggacatgattcataaacaggccaaacatagaaaacatggcaccaaaaagcttttttgaaaaactccatggtaaaatctagacagctaaggatagatcaaaataaagaactcagaaatggagaagctatgatataggagtgacaaaaagctaagaattcatttaaacacataaatgagataaaactaatgtgataactataattacagaacagaatataaccttggataatgcaatgatgataaaaaaaaataagcaaagcagaaaggaggaaacaggaaggtgacatggagaggattctttttcttcagagcagactaatatatattgctttaacttataacacaaagttatataaaagagattccaacctcttaaatgttttcataatgcttgagaaatattttagaaaataatattgcttaagtgataagacattcagataaatttaagcaattccttccttttctgtttattttcttctataaaatttgagtaaaattaatttttacattttaaataacacaataatatgatcttatttttagaaaattatatctccttgtgaatgcactcatccactcatctattttaatcagcatgtcatttcagatgtattttgtgcatacacataattttgattattattttaggtgggttcagggtaatttttctaattttctttgcatttcactgtattactgaattctttatcatgagtatacatcatttttataaaaacagtaacattattcttaaaaataggaaagtaggaaagaatgaaaaaatattagaaaaagaagtgaaatgagacattttcaaggttgcttccagtaccagaattatgaatttgctaacagttaaaaaatcacaagaattggaggtaaggaagagcaacattgaactgaattaaaattttgagcttactcaaaagaaggatcaattattacatttgaaacattagcatgtaacaatgactttacctttagctaataaaaatgtgatccaagaaacttttagcaccaacatagaatttatttcagtggatatcctagtaaacagaaaaaaaaattagttttccaaatatacctttttccccatgttgtacaattacagactacagttgactgcataatagaatacagtccattttaaatgcacaatttacacatgaattcaattttgtctcaatttagtttgtgtttttaccaagttatttatattttcccacagagtagtataccttttctaaagaaaatactgaataccttctattgtaatctaaaaatacacccaggaagtggtaataatatgacatacttggtttccaattaattcttttctgctgttttctaattaaaatcaattttatgtgagcagaaaatacacaggtttgggtgagtccagtttaccagtttaacaccatgccctcataaactttaggacttccctggtggctcagacggtaaagcatctgtctacaatgcaggagaccggggttcgatccctgggtggggaagatcccctggagaaggaaatggcaatccactccagtactattgcctgcaaaatcccatggacagaggaggctggtaggctacagtccgtggggtcgcaaagagtcggacacgactgagcgacttcactttctttctttcctcataaactttaaatcgttcacttgttggagttaacaagtggaattagattaatagagttaattaataaatatacaatttctctttgtatcaattgtcttcagtatcattatttctgcggggcagaaaatctcatgtattactcattatgtttttttcagttttttctgaaacaaaacaaaacaaaactgtagagctcttacaatggtatactgctagaatatatatcatatatttaaaaagactatttggaaatttaaatatagacattcatgtttattcttacacaaaaattatgctttaagtcttagttaataaaatgtctgtaatacactctcaataaagattctgtcaatgaattagcattttttcagagttggtaaaaaaaaaactgctctgaatcaacttctccctttagtttccaattagttctcccttacagtaaaaggcaagtatctcataccactttctttgtgaaaagataaataatctgcacagggcttaaatctatgaccttaatttatgaagtagtgtgacataagcaatcaaatcaaccctgaaattaccaatgtgtttgggattatttcatatattaaaaaacccaaaaagtgaaaaagaacatgctctgaggtacttacgaactgctgggttgtgtcaaatatataagctcacatgtcctaaaaggaagaaataattatgttaacatcatggcttttttaaaagttacttttaacattttttcataatttagaagtcaattttataatgctttattcatcctattttaataaggatacattttttaagtacagcattataaaacaaagtagatgtttccaatttatgacatttcatacatccctataatatctacttacaaaacaactggactccatgtgtgcatttgtaacttggaatacattctgtaattgaatcttgatctggttacaatctcacaccagctcataaaagcttatttaataaagttttgctgaaataacacaactgaaaagtactacttaacggaaacctacttatttagggcagtgacttctggaatggtgggtagagtaaggatctttacagacctgttccctaaaataataactataattggttaaaaaaaaaaaaactatttctgaaaaaccatttaaagtctctggaaatttttctaagggcatacaacaaaaaagggaacatatcttcaagaaaatctaacaaatcttgatgagaacaatgagtctgaggaattcaatgcaaaactcatttcttccttcctctccagttcagcataaggaagctctatgcctgacaggtgaagccaagacacagggctcctctctctccagctctcaacctggagctctctctggggagagcaggctatcagtgcttctcatctcccacaggtgtatgttgcagaaggtctagcccaggtaagaggagctgagcggcatggggctcctgtcctccacttcacaaccactcatagggtaaagttttattccaggcacacaacacatcaaaatactgatttgtcttgtctcagctggctcccgggacagaggttccagccaagagaggcaatctgggaagactagggctactgtctctcctcagtgccctgctcttaaagcagaggtgtcgctgcaagagacaaggccactgtcagcttgctctcccaaccagcggcacagaagtggcagcctggggagaagccggtgtcaagaacacagagccttgggctctccctaggggaattaacttcactcaggatggggtgggggtgttcaagaataacagcacggttgaaggcaacgcagattttggtaaaagccgataaaagagaaaaccaacagatcttatgagagcaaaaagctaaatcctagatcattgagaggagaaccagggaaagaaacagctacgaataactctcctgacatcaaagactactcctgcaaagggagccaaatttaattggattaaactgtgaagcaatttgtgactcagagcttgtcaaaaacaagaaagtaatcagcaataaatgagaggtaacaattaagtgtgatattaacagaggcagttagcttaacaacagggggaaagatggttaaagagaaaaaaatcgctgtcagctcagtgactgtgcacctgtccaaggctacactgaggatcaaatcagaggtaacatactgggagaaaagacttcactgaaatagtgccttccatgtcatggatatgcctttcctggacatatcatataataaaagtatgtggccttttgtatctggcatctttcgcttagcttaatgttttcaaggttcatccacactgtagtatacatcagtactttattcccttatacggctgaatagtattctaccatatggatgtgtgtgtcagttgctcagttgtgtctgactctttgcaacgccaaggactgtagcctgccaggctcctccaggcaagagtactggagtgaattgccatttccttctccaggagatcttcccagcccaaggatcaaacccaggtctcctacattgcaggcagattctttaccacctgagccgccagggaagccctctaaccgtatggatagttcacattttgtttaccctttcgtcagctgatggatatttggggtgtttccattttttggctaatacaaataacacagccataaacacctgtacacaagttatggatggatgatacatgtcaaaatttgatgttttgggatatatgagttaaataaaacgctaaaattaatttcacttgtttatacttgtcatgcagctactatttaaaatatacggcttgcatttttatatttctatgtaacagcactaatatagttagtaatagctttaaaagctactgtttattaagcatttagaatgtgataggaggtgaagtaaccagtaatactgtcttacttaattgttacaattactctgcaaggagagcattattagctctatcttacagattgaaattgaggtttaaagatgttaagtatctttctctagcttacaaagtcagtaaatgataaaattaatattcatatctagatctgtttagctttttaaaacttatcctaatcactacagcacactgccatatacatacatatagtgaacccagaaataaacaggctttggcaggcctgtttatttctccatgtgtccatgagtcagacacaactgagtgactttcacttttggtatcacagctaattttcccaacagttcttcagaagaaggtacacataagataggaaaaaaaaaaatcctgattcacttcaagacaaataaacattaaattatctcataaactagtcaataagaattccaaatccctttaacaaaggcctgagtgatcttttacaggccaaatcagactctgtcacttgccagcttaaaatcaatgactccatcgccttctgggcaaagttcaatcaatctcatcccctcctaccttttagccattagcaatatccaaagtactttatggtactgctttggctttgtacacatgctgatcactctgcctaggatggtcagtcccagtctccacatattttgcttggtgagtttctaattatccttaactctactcagacattgccttcttctacagttttttcaccccataattattcttattaccttaaaaatacacagtattgttacccactacataatttctgcttcttacaaacaaccctctacaataggacatcaaacaattactgcatgtaattttattaaaatatataatctacttatttactgtaaacttcttgatgatcacagttatcatatgatttcatattacgagcatctaacacatagtggttaccaatagtcatttcattaatgcctgtgtagtttcttaatttatattcactaaaacagctgacagcctaaagtttcttaaagaatattccaccaaaaaaactactgcctctaaaccaccattaatatacaagtcataacttggcagtaaggtcaccactcagttcagttcaattcagttgctcagtcgtgtctgactcttcgtgaccccacggactgcagcatgccaggcctccctgtccatcaccaactcgtggagtttactcaaattcatgtccattgagttggtgatgccacccaatcatctcatcctctgtcatccctttctcctctcgccttcaatctctcccagcatcagggtcttttcaaatgagtcagctcttcacatcaggtggccaaagtactggagtttcagcttcagcatcagtccttccaatgaacacccaggactgatctcctttaggatggaatggttggatctccttgcagtccaagggaccatcaagagtcttctccaacaccacagttcaaaagcatcagttcttcggtgctcagctttcattacagtccaactctcacatccatacatgactactggaaaaaccagggccttgactagatggacctttgttggcaaagtaatgtctctgcttttgaatatgctgtctaggttggtcatagctttccttcaaaggagtaagcgtcttttaatttgatggctgcagtcaccatctgcagtgattttagagcccccaaaaataaagtctgctactatttccactgtttccccatctatttcccatgaagcgatgggaccagatgccatgatcttagttttctgaatgttgagctttaagccaacttcttcactctcctctttcactttcatcaagaggatctttagcgcttcttcgctttctgccataggggtggtgtcatctgcatatctgaggttattgatatttctcccagcaatcttgattccagtttgtgcttcatccagcccagcatttctcatgatgtactctgcatagaagttaaataagcagggtgacaatatacagcctgacgtactcctttcccaatttggaaccagtttgttgttccatgtccagttcttactgttgcttcctgacctgcatacagatttctcaagaggcaggtcaggtggtctggtatttccatctctttcagaattttccacagtttattgtgatccacatagtcaaaggctttggaatagtcaataaagcagaactaatagatgtttttctggaactctcttgctttttctatgatccagtggatgttggcaatttgatctctggttcctctgccttttctaaatctagcttgaacatctggaagttcgtggttcacgtattgttgagcctggcttggagaattttgagcattactttactagcgtgtgagatgagtgcaattgtgcggtagtttgagcattctttggcattgcctttctttgggattggaatgaaaactgaccttttccagtcctgaggccactgctgagttttccaaatttgctggcatattgagtgaagctctttcacagcatcatctttcaggagttgaaatagctcaactagaattccatcacctccactagctttgttcatagtgatgcttcctaaggcccacttgacttcacattccaggatgtctggctctagatgagtgatcacaccaccatgattatctgggttgtgaagatcttttttgtacagttctcctgtgtattcttgccatctcttcttaatatcttctgcttctgttaggtccataccatttctgtcctttattgagcccatcgttgcataaaatgttcccttggtatctctaattttcttgaagagatctctagtcattcccattctattgttttccgctatttctttgcactaatcactgaggaaggctttcttatctctccttgctattctttggaactctgcattcaaatgggtatatctttccttttctcctttgcttttcacttctcttcttttcacagctacttgtaaggcctcctcagacagccattttgcttttttgtatttctttttcttggggatggtcttgctccctgtctcctgtacagtgtcacgaacctccgtccatagcacatcagacattctatcagatctagtcccttaaatctatttctcacttccactgtataatcataagggatttgatttaggtcatacctgaatggtccagtggttttccctactttcttcaatttaagtctacatttggcaataaggaattcacgatttgagccacagtcagctcctggtcttgtttttgctgactgtatagagcttctccatctttggctgcagagaatataatcaatttgattttagtgttggccatctggtgatgtccatgtatagagtcttctcttgtgttgttggaagagggtgtttgctatgaccagtgcattctcttggcaggactctattagtctttgccctgcttcattctgtactccaaggccaaatttgcctgttcctccaggtgtttcttgacttcctacttttgcattccagtcccctctaatgaaaaggacaccttttttgggtgttagttctagaaggtcttgtaggtctccatagaaccgttcaacttcagactcttcagcattactggtcagggcatagacgtggattaccataataaggaatggtttgccttggaaacgaacagagatcaatgtgtcatttttgaaatggcatccaagtactgcatttcggactctttggttgactatgatggttgactctttggttgactactccatttcttccaagggattcttggcccacaggagtagatataatggtcatctgagttataaaacaaataattttggaagaaatattcagaatgtatatgactggacaaataagaaagtcaagactattaagggaacaaatctaaggtgcaatacatcacaactttactaagtatgtaacagttcccagatggaatctaatatgaacagtgacatgaaaaagcagggtgcaatcctaataaaatttttactttacctttctaatttgctgtagagtgcacacaacacattatacttcttcaacagtcttgacacggcattatcaactttggtgctagtatcaatttcttttagtaaatcaaagaatttatagacactgcaaaggaaagaatagaaaaaagtgaatccacaattttagaaatttattttttcattttcaaagcatagacatttcaattcaaaaggcctgttagctctgtaccaaatcactattataccctttggaaggaattagtttttgcattttactagaattcaaagggaaaaaaagaaatcaactagtcttcaacctatatccctgtatctatacacctaagccaagaacacagaaaaaataagggttattacagacatacaaatatttagttctgtatttagctgtatgttttaaaaaccctaagttcccatccatttatcctacacaaaaactacctgttttgttccaatgttttcctttacatattataactctcctttgacagtgagaaacctgggatccacctatctctaactcactcatttaatcaatccccctgtaacgaccaagctaccaactcctccaagttggcaccctcctctcctgctcggactgactcccccaccctgaactgccctcacccttccacataggcatctgaccactcatcccagatagctcttacctcacatgtgctgtgtctccctacatcagctctccacacacctgcttggtctgcccttgcacaccaagcagcccatgtcaagaagccccccacacccttgggggatgacctcctcatcccactttggctctaacacccttctcagggagccatggctctccctcaccatagatgcacacacctctctttaccccaccaatggttttaagggaaggaaaaaggaaatagctgggagctcagatggtaaagaatttgcctacaatgcaggagacctgggtttgattcctggattggaaagattccctggagaagggaatggcaatccactccagtgttcttacctgggaaatcccatggacagaggagcttggcaggctacagtccatggggtcacaaagagtagaacatgactgagtaactaacactaataatttttatttcacaggaaaggaaaggaacccgagacttaataaggataagcattctatttcaagtcctataccttgtaaaatatacccagtctatcttaacccaaatatagattctctttccaatccccttaagtcactaaaacatttgctgatgtaaaaatttacctctatattcagattgttttcagctatataaaacctattttggtttagtgatattatttaataaagttaaactttgaaatctctgagacataaacaagttctaatttaatcagttaaatatgtacacagaaggtctttgtttccacattttatctagaggtagtaataaaattactaaaatgtgaaataattttatctcatttacacaaaacaccaattatgtttaactctagatggctttacccaagaagaaacatactactatctttttggtaaattatttactattagatattgtaaatatactgcaaaagaaatgactagaagaaatgaccagaaggcttctcttcagttgttggaaacaattagtaaattctcattaggcttataaactcaatacagacattaagtaattacaggggcaagtattataatagatacttaactgaacacacagtctcaaaacatatacaattacaatatctattatattaaaagtcttaaactttaataaatcaattaaattccttgaagatgggctcacactacttttacaaagtttttaatatataataagcctatttaataaagctgcctattttgtccactttatcaacagctacaattaagaaagttaacacagtgagagatacaatgaagattttcccatgacacagactgctacattttaaagaaagtgcagcataaagacattaagggccccagcagagtgggagagttcactagttgacccaagttctccatgttttagttaattttggcatttcccaccaattccctgaggtctattaaaatgatagttcaggaatagttttttttttttttaatggcagaggcctatattaatgcaagaaattttacctggtttcaatatttttctgtagctcagtgaaagtgaacggcatctcatctaagtcaactgctgcaataaagatacagattccccacagttcctttttcttttgaacataaccttcctgcaaacaaaacaaaaaggttcgagtaatttgttaaatcatttacacacaaaatactaggcaacttttttcttattgagcataacaaaataaatttgttcctaagtctttatgagaatatttaattctagactagtacaaactagttacaaaattaggaactcaattttatattgtaaagcaaaaaaaaattaccagataggtcaaaagttaaactacaactttctataagaaatctagaagccagtcagttctctgaggtaaacattttcagttctcaataacacaacatcatccaagccaaggtgaaagattttacttcataacataaattgtgtttaaaaaacaagcccagtttctcacttgattatcctccttttgctctaattcacttgttcttttaccaatctattgattcaagtattttttaaccttatgaaatttatatctctcagtgttctaactgccttccttgtaaaatggaaataataatacttacctcactttgtaagaattaaatgagactttatataaagcccttaccacaatgcctagcatttaatttgtactcaatgaatgacagctatcattatcattagaatattttttcatcattagaatacttattcccctaaaaatatatatttatttaaatatgtgttttataggtaaaattggattatattaaattgaaaacaaaagaaataacaaattatctaatgttctatcaaacagttggaactacttacttactcttaattgtagagtacaatggggctgaaaagtatatgatgcaattttatattgttttaaaatctcaattacataaaagttttaggaaaaagaattattctagattatcaaattttagggataatacaaagcttattactatccaactctaaacttttccttaatttaaaaaatcatatctttatcttcatacagttttatctcttccaatttgtttttttagtatcttctaaaatttgacgtatctaataatttagatcactgactcaatggacatgagtttgggtaaactccgggagttggtgatggacagagaggcctggcgtgctgtggttcatggggtcggacacaactgagtgactgaactgaactgaataatttttaaagaaatgatcattatgcaactaacacagttttgtcactttggggatacagtgatgaaaacagaacaaacaaaaaaattccctgtctccctgggagttacacttctatttaagttaaaaacatgaatttttgtgtcaaacattcaagactttgaacacatactctagttgtataactgtaagcaactgattcacagaaggcaacggcaacccactccagtactcttgcctggcaaatcccatggacggagaagcctggtaggctgcagtccatggggttgctaggagtcagacacgactgagcgacttcactttcactcttcactttcatgcattggagaaggaaatagcaacccactccagtgttcttgcctgaagaatcccagggacggggaagcctggtgggctgccatctctggggttgcacagagtcagatacgactgaagcgactcagcagcagcagcaagcaactgattaaatctaattaaacctcagttttttactaaaatagaaatgataatagtatcctatcagggtcaatatgaaatttaacagtgaggatggtcttaagtaatcagcacagtgcccggcattatactcattcagtaataaacagtggcagcactattatcagtgaatctagcactcattcctctacatcatatctgtctcagaaactgtccacaacccaatcttctccacaccaaaaatattcatccctgggaatgctgaggactactggagttttgtgtgtaagaaatcatttgtattgacttctagtccctggcaatcactgatctgatttcaattccttctctagaatgtcatagaaatggaattatataggctgtagccttttttgtctggcttctttcacttggcataatgcttctgagaagtcatccatattgttgtacctattagtatttatcccttttatttgttgagtagcactccactgtatgaatataccacactttgtttatctattccaatagctgaatacactgctatgaataaggctattaaccttgagccttaaatattcaactacagatctttaagtggatgcatattttcatttatctcgggtgaacgcctcactggggaatgctaagttctacattaaatgtaagtttaagtttgtaagaaactggtaaaccgttttcccaggtggctgtactgctttgcagccccgccagctacaaatgagagttcccgtttcttcacaccctcaccagcacttagtttctgtttgttttccagtcatcctagtaggtgtgtagccgtacattttcccaaggactactaacactgagtactttttcaaatctcacttagcatctggatctcttcttttgccaattttctattcagttgtttgtcttatcaagttgttaagagttacttaaacattctggattcaaattccttaacaggtatgtgttttgcaaaaatcttcaactgatctgtagctttgtattttcttaaatagcatatttcaaagggcataagtttttaattttgatggagctcaatttattattttgttttatagatcatgctcttgctggtactatccatgaaatctttgtttaatccaaggtcacaaagattttctccttggtcatcttctggaagtttatatctatgcttcatttgaattaatttttatgattggtgcaacatagggactaaagttcattttttgcatatggatgtcgaattgctccagtatcatttgttgaggggaactcctttctccattcaactaccttagcacctctgtgtgcaaacactgacccatatgtgtgaattctattttctgattctctgttctgttccactgacctagttgtctttctttccaccaataccacaatgacttgattactacagctatgttttcttctttttttagttcagtttgattcaagacttttaaatccgtaaaacgacatttgattcagttctcattgtgcagattaagaaattgaagattagagcgtggagacttgcccaacacagcctatcaatgccacaggcctataaaaccacagtttcctaacactcaaattagtcttcttccctttatttaagaatatttccttcctacatttctacattgattttctaacattttcattattgaaatccttaatctcaccaccccactacaagttttgtactcttcatttctattttgttgagaaggttagagaatcacaattccaaaggcttcagcatgtttctccatggtaatttctaattaccatatactcccaatgtccctgcatctagcttcaggtccctcttctcttccgactttgacaaatgaacatcctcctccactcttaaatcagtaaatctactccctcacttcttcccactttggatcacctccttcaagacctagtttattaattcctccctttgtcttacataatttatcttacagttctttctaaacacgtgcttctgtttagctacaaacaagcttgcactgtgctgtgctaggtcactcagttgtgtccgactctttgggatcccatggactgtagcccgccaggctcctctgtccatgggaattctccaagcaagaataccggagtgggttgccatgccctcctccaggggatcttcccaacccaggtcgctcctgcattgcaggcagattctttaccagccaagctacgagggaagccccacaaacaagcttacatcacttaaaaaaaaaagctatccttctttccctggactttatcaagctactgttagaaccacacgaaccacacatacacacctctcactgttcacacacacacactcaccagatacactctcccagtacacacctactacatccactgaacacatacttctactatataagcactattctactgagactattgcctaagtctcgagagatctctctctaaactgaatagacttttctttggtttcatctacaaagacctctatacaacatctgacaccactgtaatgaaacttttctccttagcttttcaaacacaattaacatcctcattctcttttttatctctatcaacttcttccgagtttcctaattccaaagacttttccccaccaccttcttcttccttctgccgtctgcagcttcatccacttctacagcagccccaactcctcgatacagatgtttcacatgactcatcctgctttccggccctcactgatgtctcaagatctaggccctattttccaaaggcaattacaacccaaaatttgtaactgaattgtttcctcaaaaatttagttgagaattatgtaatggcgtcggaatagcacctttgaaaccattaaaacagaggaaaagcaagttttactcagccaaaagaatcacaaaaaaataaatgaaaaaaggaaaaaaatgaggaaaggataagaaaaagcatcttgcaaaagaaaaagacagtaatttccaataaacattttgaatataagaacctcagaagagtgttaattgaaggacattttgctaatctgcatcaagagccttaagagttcagttttatctttatgaatttatccaatgaaaataattagagtaagatttagtataataaatgttcaaagaattacaacagcaaaaatagtgggaaacatttaaatatctttaaatagaacagttaaataaattatgatagagctgtatcaggagctacataagactcttagaaaacatttcaaagattataaggacacaggaaaaaaaacagacacattacaagaaaaaaaccatcagaatacaaaattctgtgtatattttgactccaatttgttgaatatttttaaaagaaaggataggcaaaaatatatcaaaatgttaactattatctctaggtggtaggattacaaatggttttcattaatcctaggtatattttctaaattacctacaattataaaatagaggggaaagcaagtcaattaaaaagtactaaatttatataaaacaggtgagaggaaaaattatgaatatttttgagaaaaatcttttttaaaatagtaaaactttaattacatacactatagtttaaatcaaaatctataatcaacacttaagagattactcatttaagctatcattcagtttagtttacttaaaccacccaactggtaaccctgagttagtgatatgacttctactgggttaaccaaaaagtttgttgtgtctttttccccatgatattttatggaaaatactgaacaaagtttctggccaatccaacacttgctcttttacgatgcactaacttataaaagagctcccccaagtggtaacataaatcatcttagaaacatctgaaaagtaggttatcttactgaaaagtaggttaacataactagcatgaatttaacctgaaattttaaaagttaaaaacactactctctcttatctttactttttaagatatcaaccatgaaaatgatggaaataagccatagtaaacacactctttatctcagggtcaaaaggatacatccttacaccagattcatgagactgtaatgagtgattagcaataaagttacaagttaaatgtattacagaagtagagaggctaagagctgcctttatatcttcccctcctggatttccttaccagggttatatgtaagaacaaaagaaataacatgctaatatgccagaaaatcctccctctcgcttgcataatatcagctgacagcactcaaaacctgagtgctaacgaaattcttgatgtgctcccaagaaccagaaggcaagagtagcacagccaagaagaatacaaaagctaacttcacttgtgctcgatcatatttttgattcaacatgcagaggtaaacaccaactgaattagccacccagttacacaatggctttgtggggaaagagttgactctactcccagaaaaatatgttcttggcagattcagattcctctagtcttctgcccaagagatgagtacttggagctaagagcttctacagaattcagtggttaggactatttaagcacctaactaaactcaagttcagtttactagattgttcaattgtccctatctcaactagtttgtaagattttgaaggcataatcacaccaagtacactgctgaacccccaagaacctagtataatggccagcactaacttaacattaaatgtatatattttttaaaagcagcatcaatactcatatcccagcataggatagaatgacttttgactttttgactttctcgtctttccccctagtaggctcagagaactaagcagcaactgaatcattagtaaagagttttaaggtgagaatattggccctaccacaatttctttatctcctgatcacacactgatcagctactgaggatcagcaggattaattcacacaaagaaatgaattacagtcttcacttcctaaacttgtaatacataactgacctggaatttagtttctagtcaagctctctgctttactgagtcaaaggcccaaaaaatgacccactcaagaagatagagccatagagcagtgagaacagccaccatattaaaacaactactcattaactgatgtctacccctcttagaaacaaagatgaaaaacactgaggaagtcaattactacaactcagatttaattatgtgtataaatcgtatttttcaaagttagcatgtccattcactccaccaatatcatttgaaaaaatgaaaacataactactgaataaatgagttggcattagaataaaagaatctcagttggaagggaaaatgaaagagatcactgatcactggagtcctgtggtctgggagtctctagggttcaaatcataaaatgataatctttggctaatttgcttaaatttttaaaaacttaagcgaacccatatgtttactttcaataatgcctcagtaactaaagtagcaagtgtttcacttttgctagaattcaatgcagcaaggtaacacaatttacctttatactgataaaaagcaagggctgtcaggcttgaataaaattaggaaaaattattatttaataaagtttggtacactttctaaaagagatccaaggtgggggaaagtttggtggtttctgactgcaatataaatctgattcaacttaccttaaaaatggtttgcagaatgagaaaaatcaaggcacatactgaaaagaggtaaaacagaaaaggaacaggcatttttgacaaaataactcacttcaaaactttcctaaatatctaggtctcatataaacttgactacttgtttatagctgaacatgtgatagaaataactaccaatctgaacatcaataattatgactatcaggcctctaaaattataatgtaaataaggaaaaaaactgattcactgagagagtatttataatcatttctttcaaaacaacacctgttgtatctaaattatatagggcataaagatgtttaaagtacagaaaaacaaacagtcctattaaattgaggttgacgatacgctagcaaacctggaagcctataactctccacagtcatttcaatcctaagggggaaaggtgctatacagaatgtgatatagtcttctggtagctaccattcttctggtatctacttctaacatgaagaataaagagaagtgaatgagtaaagaagatgtggtatatagaacctactaaatgtcactcagccatataaaagaaggaaatcattaatgccatttgcagcaacatggacggacctaatcatacaaagttaagtcaaagacaaatctcatataatatcacttacgtgtggaatctaaaaaccgatcaaatgaactcacagacacagcaaacaaacttatgggttaccaaaagggaaagagcttgggagaaacaagatattcaatatcttgttataacccataatggaaaagaatttgaaaaagaatacacgcacacagaactgaatcactttgctgtacaccagaaaccaatacaacactgtaaacttcaattaaaaaaaaaaaaaaaagcagggtaaagtgaagagaaaatctaagggagaactagggcagagtatagtattaaacagtgctaggccttattggaaaagtgagatatcagcaaagatattatcctatgagcaaagacataatctattaaattttgtaaatgtgaaatgtcttctgacccagtggtttcacttctaggagccaacattacagaagtactcttattgtacactaaatgtatatataaagctattcactgcagcagtttgtagtatcaaatgttcaaaaataaactaaatgtttgttaataggggaatatataaataaattacacgcccatacaatggaaaatacatccactaaaaagattaagctaaacacagaaggagaggtactcttcactacatgaaaaaagcaaggtacagaaaaacacaaaaactagaaacttttattagctgcctatggaggagaagtgggtaacttaggggaaaatatgagagaggttttcattgcttacatttttattttttttgaatcttaaaccatctgaatctactgcctattccaaaagcatcaataattacttaaattggttaaaaagtgtaaataaataataaaacctcagtgaaaaaaaaaaatcctgtgtgtgtgtgtgaagggggaaatgaggaagggttagaggggcagaatgaataaaaatttatcagtggttatttctataaaggtgggaatacaaagagagcaatggatattcacttctcactttaatactatgagtttcaaatatatatgtgtgtttgtatataaatattcatttatatatgcatgttcatatggaaatatatatttatttgaaatacagaaagggaaatatagaaaagtgggaaaaaatgacaagaaagatgttagggagaaaaactacatgctctgccttgaaagttggcattcaaatctgttaacagttacaagagtcataatgaccacaaaataaaataaaatgtcttctcagaagaagcctagctagtcttcattcagagatgagagtaaaattccttccatggttcctcagaaaacacaatacatgctgcagtaaaaatagcagtcaaattatatattattataacaattatctataattacatgttagatatatctgagtagttcatgatgaaagctcatgatgaactttaataatgctatccgacgtatatattaagtttaagacactaaatggtgaagagggaagaaacggtttgattaaatttagagagtataaaagtagagaaaaatcaacaaaaccaaaaactggttttttgaaaaaaagataagcttgatcaagaaaaaagattcaaattagttaaaattagaaatgacataaggatattaagaccaaccttatagaaattttaaaaagaatcataacaggaatgctataagccactgcctgctgacaaatcagataatttagattaaatggacaaacttctaaaaagacagagatgaccaaaccaacacaaaaagaaactgacaatttgaaaagacctgtaacaaagttaagagactagactagtaattttaaaacctctccacagagaaaagtcgaggcttagctggtttcattgatgaactctaccaaacatttaaagcagaattagtatcaattcaccaagtggacggagaaggcgatggcacccaactccagtactcttgcctggagaatcctatggatggaggagcctggtgggctgcagtcatggggtcatgaagagttggacacgactgagcgacttcactttcacacattggagaaggaaacggcaacccactccagtgttcttgcctggagaatcctagggacaggggagcctggtgggctaccgtctagggggttgcaaagagtcagacacgactgaagcgacttagcagcagcaccaccaccaagtgaaagtgaagtcactcagtcatgtccgactctttgagacccatggactgtagcctgccaggctcctctgtccatgggattttccaggcaagagtactggagtgggttgccattgccttctccaggggatctagccaacccaggaatcaaaccctggtctcctgcactgcagacagacgctttaccgtctgagccaccagggaagcccatcaattaaccaaaatgctccataaaagctgaagagaaggaaacatttcccatctcctttggcagtcagtactaccctgacactaaaatcagacaaagaccctgtaaggaaagaaaatagagaccaaaatctcttatgaacaaatgcataaaaatgctgaacaaaatacaaggaaacaaaatttaaatatatgtatatatataagaacaattacacaccataaacaagtgaaacttatcctagaaacacaatgttggtttacaatctcagaggaatataatacattataataaggagaaaaaacatacagttgtctcaatagatgcagaaaaaatcatttgacaaaatcccaaaccatttgacaaaatactcaacacaactggaacaaaaaagaagttcctcaacctgacaaaaggcatctccagaaagcccacatcataggtaacagtaagactgaatgttctcccactaagatcaggaaaaaggtaacaatgtattggaggttctaggcagggcaatcggctaagaaaaggaaataaagggcatctatctcaatcccaaagaaaggcaatgccaaagaatgctcaaactactgcacaattgcactcatctcacatgctagtaaagctcaaaattgtccaagccaggcttcaacaatacgcgaaccgtgaacttccagatgttcaagctggctttagaaaaggcagaagaaccagagatcaaattgccaacatctcctggatcacagaaaaagcaagagagttccagaaaaacatctatttctgctttattgactatgccaaagccttggactttgtgtggatcacaataaactgtgggaaattctgaaagagatgggaataccagatcacctgacctgcctcttgagaaacctgtatgcaggtcaggaagcaacagttagaactggacatggaacaacagactggttccaaataggaaaaggagtacgtcaaggctgtatattgtcaccctgcttatttaacttctatgcagggtacatcatgagaaacgctggactggaagaaacacaagctggaatcaagattgctgggagaaatatcaataacctcagatatgcagatgacaccacccttatggcagaaagtgaagaagaactaaagagcctcttgatgaaagtgaaagaggagagtgaaaaagttggcttacagttcaactttcaggaaactaagatcatgacatctagtcccatcacttcatggtaaatagatggggaaatagtggctgactttattttggggggctccaataccactgcagatggtgattgcagccatgaaattaaaagacccttactccttggaagaaaagctatgaccaacctagatagcacattaaaaagtaaagacattactttgtcaacaaaggtccgtctagtcaaggctatggtttttccagtggtcatgtatggatgtgagagttggactataaagaaagttgagtgctgaaaaattgatgaagaaaagatagaaaagatattactacgacaataatagtgtataacttcacattttgtttctatataatttaagagagtgatacattaaaaaatcattagtttatgtttttggactcttgatataaaaaggcatacttctgtgacatcaataactgaaaggagtgtggacagggctaatgaagtatactgctactgctaagtcacttcagtcgtgtccgactctgtgcgaccccatagacggcagcccaccaggctcccccgtctctgggattctccaggcaagaacactggagtgggttgccatttccttctccaatgcatgaaagtgaaaagtgaaagggaagtcgctcagtcgtatctgactcttagcaaccccatggactgtagcctaccaggctccttcattcataggatttttcaagccaagagtactggagaggggtgccattgccttctccaatgaagtataattttctatattattgaagttaagcttgaaaaaattcaaattagagtataaaactttaagatgctaaatgtaatcccacagtaatgataaagaaaacaaagaatatacacagaaggaaataagaaaggaatttaaacatttcaatacaaaaggtcagctaaatacaaaagaatcactgaaaacagaaaatcaacagaaaatccaaggaaatcaaaagctgatactttaaaagatcaataaaataaaaaagcctacagccagaaaaaaagagagtgaaaaagacgacacattattataatagaaatgtattgactctttttttcttgctgtcttttgaattctctctttaacttttgccattttaattatgatatgccttgggttcatactgtctgtgactttgtgtttcctgcacctggatgtctgtttcctgtctctgtttgggaacttttcagccataatttcatgagataaattttttacctctttctccctctcttctccttctgggacccctattaatgtgatttttagtacaccaaatgttgcacccaaagtcccttaaacaattctcattaaaaaattttttttctttttgctgttgggaccaggtgatttccattattctatcagataccttatgcattcttctgtatcacctaacctgctgttaattttctctagtgtttttcatttcagtaatcctgttttctagctctgactggttctttttgtatgtgttttctaatcccttgttaaaattctgtgttcatctattctattccccagttcagttagcattcctgttactattggattctttataaggtatttacctcgtttcatcagattttttcggggttcttgccctttcatttgaaatatagtccttagtcttattttgttcagccttctgtcaccatgaaattaggtgaaacagttacctatcccagtcttgcaggcatggcctcgtgtgggggtgtcccaatgcagtctgcatgtgcccagtggctctggtctgcgagctgctggatcacaagcgagcgaaagcaggctgtcttcccctgggctgggcaggcagccatcattctgatggcctgaagttggagcagctgcagtccgaactggggcttctctgctcaagggcggtctccaccctataagaggtgggggcggggctccagtggctggaacgaagtgtactgagacaagtgggtttctgacaggagaccctgtctaggtatggggtgcgtccagggctgaggacacggggcagaacttctgtgctggtttctctccctccccaacccctggcgtgcatgccttggttagagacccagtcaggacttgagctggcgcctgcgctcactggccaggtttcactcccctccagatgcgcgcagggacacacaagcctgcgatggcaggccccaccctagagctagttttactccccctcaagtgtgtccaaggtcggcttaccaagtgacaacattctccgcctgggatacaccgacacccaggctggcagtgtctgcctccacactggtcagagtcggggcagggtgcaagcaggctcgcagcccaagtgtgcacactctcaggagcagcccgcgcctcagtgggtgcagcggctgggcaagaggcgctggagcaggagccctgagcaggctgcgggatacactgggatggttctggtaagccggccagggctaaagaagttattccatctgctgactctgtgctgtgaccgggaggaggcaagtctgtgcatgtccttcaagggccgagtcttggtttcttagagccctctggtaagccccagtggtttccaaaccagctcaaggggtcgtcttcccagtgttggacccgtgggctaggtcgcctaatacatggctcaaatccctcactcccccagggaaaatccccaagcctgtgccatctccctccccttctgtaccctccactagcaggtgcaagtcccgaccagaccagactgcttctcctcccttcctgccagcctttgtgtagttcttcctttacagccttggttgagaaagagccatctggctcgttcccaaatcagttttaccaagcaccgctctatatgtagttgtggttttgatgtgttggtgagtgaaggtctactccattgtgatctctcctccccaggtacgggttttcacagtggacgcaccaatatactgttcccttttctctatgttgtcaccaacgcttgttacttcttgtctttttgataataaccattgtaacagatgggagtggtattttactgtggttttgatgtgcatttccctggtgattagaggttaagcaccatgtacttgttagccatctgtgtcttccatggaaaaatacctattcagtccctcagcccagtttttaactggattgtttgttctttaagtattttggatattaactccttattagatacaagatttgcaaatattttctcccaattggtaggttgccttttcattttgtcaatatttcctttcctatcagaagctttttattttgatgtagttctacttgtttatatttgcttttgtttgctctgctttgggtgtcaaattaaaaaaatcatcgccaagacggtggtcaaggagcttgcacctatgttttcttctaggaatttatggcttatgttcatcaagtctcttaatccaatatgagtaatttttatctatagtgtgagacagtggtccagttttaccagaaccctttactgaagagatggtcttatcactattgaatattcttggcttcttctgtcataaattaactgaccatgtatgtgtagcggtttatttctgggctctcttttcttttgtcttgatctatgtgtctgtctgaatgctaaatcccattctattctgatgactacagctgtgtaatagtttgaaatcaggaagtgtgatggcaatgataatgatacaataccaaaggcatgattcataaaagaatttataacctggactttattaaaattatttctgctcaacgaaagacactgtcaagagaatgagaagttaagccacagcatgggagaaaatactggcaaaaggaatatctaaagaggactgttttctaaaacacacaaactcctgcaaaaactcaacaatgagtaaataaacaacagattaaaaaactggcgcaaggtgtcaacacctctccaaagatgtacagatggcaaataagcatatgaaaagatgttcagcatcatacgccattaagagaatcacaaattaaaacagtgagatatcacacctattagaatgggcaaaatgcaagacagtgacaataccaaatgctcgcaaaaatatgacagcagcagcgctttcttgaacggtaccaccactctgtacacaatttggaagtttcctacaaaaatgaacatactcttaccataggatctctgcaataggatccaacaacaacactccttggtgtttaaagagtggaaaactgatgtccacaataaaaatctataacaaatgatatagatatagaagcttcattcatagtagctaaaaactacaaacaacacaaccacctttcaataagtgaatggttaaacaaactgtggtccagccataccatggaatactaccaaaaaataacaaagaaacaaactattttcaacaagctggattgagttccctccacaaaattcctgtgttgaagctggagccctaagtatctgagaacataactgtgtttggagatagggtctcaagtggtacgtaagttaaaatgaggacagaagtgtaaagctaattgaatctgactagcatccttacacgaacaggaactctggacacccaaaagggcaccagggatttgtgcacaggaaaaccattccagaagacaaggagaaggccgcagaagaaaccaaacctgtccatagcttatcttggacttccagcctccagaactgggagaaaacacacttctgttgtctgagccactcagtctgtggtattttttttatggcacccttagcaaacaaatataatgacatttaacatcaatgtgtctccagggaattatgcttaatgaaaaaaaagacaatccctaaggttaaatactacatgatcttatttccatttcattcttgaaattacaaaatacagctgactcttgaagaacatggctgcaaactgtgtgttatatatagtttttcaatagtaaaggctactgttgttttccagtcactaagttgtgtccaactctttgtgaccccatggactgcagcacgccaggcttccctgtccttcactatctcccagagtctgctcagattcatgtccattgagttggtgatgctatctaaccatctcatcctctgctgccgcccgccccaccttgcctttgatctttttcagcatcaaagttttttccagtgagtcagctcttgcaagactatagtactacactataggcattttttttcccaatagtaaatattatagtactacatgagctgagattggctaaactctcagatgtgaaactacagaaatggaggaaccatgtacatgaacaaactgtgtatatggagggtcaaccataagtaatacagattgtcgactgtgtggaggtttgctgcccttaaccccaacactatttaaggatcacctgaatgttatctttaagtaaagatcttattaaatgtctatgtatagtcaaactggtctattggtattataagataatattaatacttgaaaagatgattataatcattggtcacttttggggaatgttacgagacaaactcatcagcttgaaaactagtcaataaacacaaagaataaagcacttatcatacctttcctgaatgatctatacttcagaataaacacagttgatggaggaaagtttctatttacagaagaattacaactattaattgaaaagggaaagattagttcctctcatggctccagtcaacggtcatcaataatagcttacattaaaagagagagaacaagacattatatgtctaccaataggcatacacaacaacatctctgaagcatttcttctgaaaaatatcaacccaggatctgatcaggcctctagaatcatttctaaaaaacacagagaattaggaaatacgttaaacaacgaaggaggtataatctgtaaaatgcacacagtaaaaaatctcacaggataaaaactcgtttcttcaaaaaatacagtgaaaaaaaaataagaaaagaaaggaaatgggggagggaaggaaaaggtaaaatctacagactgaaagagattttaagacacaaatcaaccaatcacactgtgtaggcctatttaaatcctgaacttactgaaaaaaagaatttatgaaacaagataattcaaacaatggatatttgatattaaggaattttcattaattttatcaggtgtgatgaactgtggtgcttctgttgtttggaggggattgtcttctggtgcagcttgtaggatcttagtctccaaatcagggattcagtccatgacccctacagtggaagtgtggaatcctgatcagaggaacaccaggaaatttcttgtggtcattgttttaaagagttcttttttttcccccccatacatactgaaatatgtatagatgaaacatcatatcttggatttactttaaaatctggagttagggagaaatagagtttggccatgactgataagtactgaagctggttaagaggtatgtgagagttcagacgattttctttaacctacttatataaatatctgaaactctccaaaataaaatgtctttagaaattaatcttagaagtagaatcagaagtaaaagaacctgcagataccctacatctgtaatacaaacgtaacattcacgcccatgttctctagcagtttacagtccatggggtcgcaaagagtcagacacgactgacgacacacacacaaacatgttcttaaatgtattttgctcagcaaaacccacaagcaatcagaatataagcaccatcttcaaatagatagggtgtatatataactaaggactaaaaaattacaggtaaagaaatttttcattacatataattttaaaatatatattctgctaaggttattaagaaacctcttcatatttttgtagcacagcttaaatagaatgcctagttttactctaattccaaactattctcttcaattatctttctaaatgtaattacctctaaaatgcttctatcaagggtaatatatttcaaagcccttgaatatatacacacacaaataaacataccaacatacaaatacacacacacccccctatgcaaaagcctaaaaggctgatattcagatatcatttctgcttatgagcaaactgagaactggttaattgggattagccaatttgcccaaaatcatatagctacattacaactacagtaagagttttttgccctgaggtccaaggtttatttcttctctgccacactgtcattcaagatgcagaaagaaaaccaatattccaacaactgatttaccataagtcacagtatgagaagtacatctgaccaatttcttattttattcatatgctgtaagcagcatgaacacaatttaatcatatgacagcaaccacatattacacacttactaaacatttatacaaaaaggagaaatttctagacaaaataccaaacctttcctttaaaaggattaatatatgctttcctgcatgtataaacaacttttttttactctcaagaacctaaaaatgtgaattttaatgaaagtgccacgtcagaatcactatacatccattgaaaatttcaaccattttaactgatccttaaattcttttaaaaaatattaatataagattttctgcagtaggtcattagtaaaaatattctgctggcatgaccaaatataagcactcatttacactaataaatgctttatatgcatgaatttaatctaccaaataactccaagacccagaaattattgttagttccatttacaaataagataattgagacttggagattttaggtaccttttcaagatcacagaggcagtaaatggtagatttgaaacttgagtcagtccagtctcatgacaaattcttgctcttaacccatcctttgtttcaataaacattacctattttcagttgccaaaaattaccctgagtgaccacattcttcttgtttcaaagaagatagccaagtacaactagaatggctgcatcagagacaggctcattttttcactctctggcttctcagtactcactgtgtcacattctcccttagaaattactgtctaaatgaagattaaattatcaggccaactctcaaaaacttaactatcactgaaaataacatttctatggaagagtctggtgaactgtaacagaaaaatacaacatcatcctgtcgcacccaacgaaaagatgccccaagttccaaatgtaacatgaaattcctttcttattttcctcagcacacaaccaggaatgacttctcatctcctagtccccatcaagagcatcattaggagatgagttttaaactatgccagttcccatggaagatagggacaaagccaggagaaagaaaagggtaggataaaaagcagtaacatttatttatttatatatgtatatatgaaagccgaagcccaaaactattactgctagaattcagtctttttaaaaaagtttcctgtgaactagcctgcaaatctaactaccttattatacttactaagaggtctggattcctgggtcaggaagatccgctggagaagggataggctacccactccagtattcttgggcttcccttgtggctcagctggttaagaatccacctgtaatgtgggagacctgggttcggaagatcccctggagaagggaaaggctacccactccagtattctggcctggagaattccatggatcatagttccatacaactgagtgacttccactttcaagagatctggaacacaactcacttaaaaattggcaactatctgcacttaccaatactgtctataatcaactaccccttctcaactttctgaaaactaagagcctagtatttacggaagagagagaagtgaaggagtgatgactctctttaacagcacatgcaaagaaatggctttgtacatgatgtacccaaatcagtggaaatatatattaggtgctttgatatgataataccaaagtcattcatccaagatacttcaagaatgcctttttagtatgtagttctagagtatgttcagatctttggaaattgtgaggtttctcttttttttattaccagatgttgaagctgaaactccaatactttggccccctcatgcgaagaactgactcactggaaaagaccctgatgctgggagggattgggggcaggaagaaaagggaacaacagaggatgagatggctgaatggcatcactgactcgatggacatgagtttgagtgaactctgggagttggtgatggacagggaggcctggtgtgctgcgattcatggggtcgcaaagagtcggacacgattgatagactgaactaatagaccgaatgcttgtgtccccctcaaattcaaatgctgaaaacctaatgcccaacaagatggtatcaggaggtagagccttcaggagtgattagatcaggagggaagggccctcatgaatggaatcggtgcccttctgaaagaggccagcaaaagctcccaccagctctgcaaccgaggccagtgacaaggcactatctgtgaattccctgtgaataaagaagtgtgcctttactagacccagaatctgcctgcaccatgatgttggacttcccagctccagaacagtaagaaataaatttctattgtttataagctatccagtctaaggcatttattttaatagtccaaacagactaaaacactagagatttttttaaacagttataaatagtatttttatgggatgtatataaacatattttgctgcgttgatcggatcagtaaaaaaacaagtcagcagtgtactctaatacaatgctgaatgaaaatgtaaactcattaaaagtgattagagtgcagtttagcaaaaattaccaatagttttataaatgttcatagcttttgactcagtaattcaaattgtaagaatttatcctaataatcagagattcactcattaatccatttaacaaataattgaagacttaatttgcgccaggtatctctcttacgaataaggatgtttatcacattattttacagctccaaaaagttgggagggaaatgtcaaataacagaaagctgacaaatcagaatacatctaatggataaaatattataacaccactggaaatgacattatcaaatatatcaaaaaatatttaacaacataaaatgctcatgttaagaagaaaacatttttttaagatacaaaactacatgtaattacatatatatgtatgatcccaaatctgtgttttagatcttattagtcggaatccttagttaagttactcaatctcactcagattcagtatcttcatttataaaatgaagattttacattttacatataaaataaggattttatacttcacttcttaaaggcttgtcagatgagttacttgcaaaatgcttataatattctccagtacatatacagtgtcaataattatttgctagtgatattattatatacatagatgttgaatatatgtgcatatgtattcaagaaaaaaatggaatatcaaaatattatcaagattctgaattctaaataatataaggtaatcaggaaatttcaatactgattatatattatgatattaaaaattattttatgagtcattttttgttttttaaaaagtctttatagcataatgaactatttatgaataaaatatgaaacctaaggtttgctttaaaatactttggtgaggcgcttacatggagagttgggttttaatttttaatgttatcagaaataaattacctctggataacaggattattagtagctttgctttataattttccactttccaaattttctatggtgattaaaaattatttctgaaattaagaaaatgttttcaaaaatttttgacattccttaccaatactccatccacagatgaaactttttcccaagttaaccaagctctttctctgacatgatctggtatctttaatttctgacataatgcagtaaaatcaggttcttcagtttcttcaaactcaagcctaccaaatgaaaaaatatataataggcacatatttacaatcaaattaattaaataaatatttgtttcaatagtttgcatagaacagcactatcctgaaatagagcatcactaaatactttagaatcttatttatctttgaaaagaattacacttagaatttaaacatatatttatctttttcagtctttccagaatggtaatacgacacagtgaaaaatgtttgctggtctggtgaatcacatacttcagagcagcaaagtagcttaaagtaagtacaagagctaaaactgggaaagttgggttggttaatagcaagaggaaagcaatagataatattacaaaaccaattcaatatcattaacttttgctaaaatgcagtctacccttcacagtgttttatttaatctacttactagtagttcttagatgatgattaaattcagcctttcttcctgattttccttaaccaagacaggcagtcaaaaaactcttcttggctaattctttttcaatcagttaatgtctacttgacctctaataataatagtacaaggaatcgctaataattttttagtatttattatgatcccacacaaagtaccttagatgaaggtagattgaatccccacatcagcctattaggtaagtcctcttaccctgttttacagataaataccacatcagagaagttaaagcactcacttgaaatcacaaacagtatgtcagaaaccctgatagaaacccaataatctaactctataatccttgcccttgagcactattccagactgctaacccttctctgaaacataattaacttttggttatctcaagaatgaagatggtgtgctgcttcccttaagtaaactctcaattctcaaagcagacatgggctccatcactggaaatgcagttcgactgggccctgaacccaccccaggtaaagttctcagcttcagactgccaggcagcggttctatctttgttaagtagttaacccgtagtttgatagcccataaggacacattttataggtaaggacagatcaagaacaggctttatcttgcatggttctgacttaaagaattcatgatagtttcatcatttaaaagtatataaaatgaagtgttagaaaatagaaggaaaaaagactttcttttcccgggtgctggccagaacttcaatatttctggttactctacaatattcaagaatgcttccaagctctgtgggtaacatagggttctttgcagtagacttcaccgctcttaccaaaaggaaactggaaaatactggacatatcagagtttaatcagaaactaatgtcttctcctagaacatccctgagctttcttttttttttcccccactagtgagaatgatatttaattgataagacagtcatatatgaatttctaatagcctttcacaagccatttccaaaagcttttcccaaccttttaacaatttgtcccgaattctcttagtgcagggggaggtgagagaaatagggcctgctgatgggctaggactgtaggagggagacagaaaggagtcccatttctctgtaattgatgtgcagtctcaaagcagggccaactctgacaataataatggataattatactcgttcaatttttggttctaaccataaagcatcacaatcaagaaaaataagatgttgcaatacattatctccctgtcacgttccactgcattatcgtacacttgcttaaaatttagaatcctcttacgagaagaaaaataattccacgtgagcacaaaaacactcgttttgtactccaacaaacgaaacaaacagaaaaaaaaaaaaaaacaagcacaccaggatccttgctggctcaaagccgaaaggcaaaatggaagaaataacgaggcacgctgaagccaacgaaaatacgcaagaagagttctagaaaacaagagaaaagtttaggaacttttaagctcttggcctaaacgtctcacaatatttttgcccaggcacgagtcctttctaaagagttacgttccaccagtcactaccgatggccgtgaatccccaagaccgaaaacccccttctaagagaacgccacaaggcgcctcagccgagcttcctgggggataactgacacccaggaccctgcccttcacgtccgcgggcatgtctgccgctgcatccaaggcttttctgactgtctctcccgggactgggcttcagatagagctgcgcgcccgggggcgggggggtggggggggcggtggacacttccaactgttgcatcgctagagaccaaaacagaaagtcaaaagaccactggaggactacaaatctcaacggggagaaaaacccattcagcaaacaccagttagttcttttctatttttctcttttgcctgtgatggggtctcgaaacacccgccggatgcgcagggccgtttcgcggagcaaaggcggcacctgtcacttcgctcagcgacccgagccccacccgcccgacacctgtcaagctggagccgagaccccctcccggccgcccttcccaggcggcgcccgcacccagacccctgtcagctccctcccggcgctccgccgcgaggggtggtagaggggggacggtcctcccgccgggacccgcgccccgcggggacgcgcccccgcctagacgccgcggcgcccgccgacgcagcctcggggcgccctccccgctcgccgcccgccgccggtggctcggcccgctcacctggccagaggcaggtcctcggagccgctgtcctgctcggggtcctcctcagggggcggcggcgggggcggcggcgggggcggcggcgggggctccgcggcggcggcggcggcggcggcggcggctgctctccggggggttttgggcggcatgacgcgctcgcagggcaggcgccggcgggcgctggaggggggccggagaagggagaggacgcgcgcacctcgggcacgccccgtcctaggccgactcccgttacaaaaataattcgaacgttcccctgagaaaaaaaccgggccggccctcccccgcccggcaaccgagcgccgcgtccaaccgcgggaaaacgtcacttccgcccgcggcgtcacgtccgcgaggctcccgggcccgccggcgtcgggagggcaccggggtgctgggcgaggcgaggcgaggcgaggcgcgggccgggcgggcgggcagccccgggcctgcaacccaggcgcccgcccggaggcagcggccgccgccgccgccacagcctgcctcacctcgaaactcgcccctgcgggcgtgggtggccgggtaagggcgctacccggcccggtgggtgcgcgcgggctccctcgctatagccgggtggatccggggctgcggccgaggcccccgccgg

SEQ ID NO: 139 - DNA, 59250 bp, Hippotragus equinus
  source 1..59250: mol_type = genomic DNA
taactacataaagatgtccgtttccatcaaatcaacaagtctaatttagactaatacagcattaaccactcaaagtttgatgaacagtccttttccaccttaatgcagtgtaggaagaatagcacacattaaagtttgttacgaaaatagagtttattaaaaacatccctattgttttttgaggagctttcaccgttaccttgtcttaaattaaaaaaaaaaaaaaatagagagcacttctaattacgatttgtaaactttttaaagtcaaaacttttaaaaagttacagcaaaaagggtaatatttattcatatttcagtatttttttgttgttattttgtggctatttttaaatagaagggaagcaatcaaattgcttacagctcccaccaactactgcggggctgtgacatagcgggagcacgtataatacagcatctgtacaccccaagccctaccctcctgtgtcgccgtcatatccgacagatcccagtctctcttaacgaggagcctctgctgctgagccggggtccttctcggggttgacggatgaggtagcctcagcaggtaactcttcagaaggctttgcgactgcaggcccaggctcccccttaggaagttctgaaacagtgtctacgcttcccgcttggctaatgggaggttccacggtcttgttactgcctgccctgtctgtcacctcgggcttctccttgcctcggttttcttccttctctctacgagactctctatctctagaatctctctctctgtctcgatgcccgctagagcgtctattcctgtcttccaagtctctgtgcctgtcccggtcggggctcctccttccccactctctcctctcacggttactattctctcgatcatcattacggttcccataccgttcccggtcattctccaccctatttccaaaggatcttcttccaaatctttcttggtctctacctgaattgaactgctgctgcctgctgtcatttctgaatggctgcggcggctgctgggcgggcggtggctgctgggcgggcggcggctgctgcggcggcggctgtgcaggctgctgttgctgctgctgctgctgctgctgcggcggcggctgcctcccgtctcggtcctcaggaccccctgggcctggccctgggcccccgagccctggcatcccaccaggcctgacgaaggggccgtggggtgggaatgggcctttcattccgtgtggtggaggcattccgaagccccccgggcctggcggtggacctcggtgcatcatgtgtggaggcatgggccgaggtggcatcaagggaaaccgctgtaagtgaggcggaggcattcctggcgggcgctggagtgggatcatgccagggcgggcaccaaggagaccggtggatggggcctggagcccgatgacgggacctggtgcaactccttgggtacctgatgaggcaataaaaatgcgactgtaaataaagcaacacagagatagcatattctattttcagctgtttcctgtggtgcttggagcaaaatgaaattcacaatcttccaacgtcatactgtttgccagtctacccaggagaaactcaatgtgaagtcctagcaacaatccacggcaagcagtcctaaagatacattacacaagttatgtacacacgcctacctaatacaagcagaggtccaaatatgtcacataaggagactaatatactacactttggaaaaagtatatcaaaatgcctttctgcatagccttgattagcagctgttttatcactcaaaatacttgagaaacacaatgcactatgtcctaatgagataaagaaatgaactagctgagccaactgaaacttatttcaggtgtactcttagaaattttttactctaagtcttactttgactttctattaggaaaaaaatggagtcaatgacccagaaaatccagtgaagagggaggtttctttgagtctgtgacattaaaatgctttacgtagttaatgtgcagtcacatgctcagttgctcagccgctttgtgaccccatggactatagcctgccaggctcctcttagaatttttcagccaatactggtggtggtttagttggtaagtcgtatccaattcttgcgactccgtaaactgtatagcctgccaggctcctttgtccatgggattttccagtcaagaatactggagtgggttgccatatccttctccagggatgttcccaacccacggatcaaaaacactaacgcttgtaaaataaagattaacacaagaaagtagagtttgttttcacgtctctttttaaagcacagcataacatgtaaactgctatgccaaaatgactgctgaactatgccgagtgctcagccattcaccttctattcattttcccaaagatggcaggactgataaaagttagtgttgctgaaagtgacaataactactggtcttatttcctacttacaggaggcattttgcttatgctttagtggaacagtcaaattcaacccatcatgtatgatacagaaaaggaggaaggatttgtttcacaacttaattaagtaacaggtatcatcacctctctcatttctctgcaaatattaacattacaacaagctactctaaaaaggaaaatggtatgatcagaaggtgccgtctactcacacactgcagagatgtctttggcaagttgtaggttgtgactcaagtggcaatggtgagagaaatgcttgtgcaaggctgacagaaactaacctgaaagcacacccaccactttctcatctctcccccatccctaacatcttgttctttcatgtttacagattcaatcccttcctcccactcactttagcaaacatttaagcaagtcctactaaatcctcacaacagattttctgtatacataattattactaacatggaagacaagaatttctaattcagtttttgctcctccgaacatatggtccaatactactctgtcagacttaggaactaaaaagagtggactgaaaatgtacgtgtatcaattataactcttaacatgaagttgtaactcttatcgctttacttagagtaccttcttttaaacgcttaaagagaaacatttggtgaaaaaaatcctcacacaggagtgactctggacacatgcctcagaaatagggataataatacctgctttttgctgatatgaaatgggataaaacacataagcatgagctcagagcttggcacatcgctaagtgctgaagttattattctatacatctattttgacagatggtaaatatcctaacactaagtatttaactttgcaaaaacaccatgttttgtatttctcatcattaagatcttattagcctctcctggtcccccaatatccaccatagtttagaatcaagcattttggtaattgaaagaaattaagcttccatgttatcaggcctaagaaaatattaattaccataatgaaaagccacaaatgaactggatgaatgaggcaaagacctcagcccttcacagactcttcacacttatactctacctcagaatgatatgaaattcacagcaaactttgatgccatttactgtacatttactgagactgtaccatatagtgagacaatagcatctaaggtatttccttactcccactttttaaagaaatcacacagtaccaacacttgtggacttaaaacaagcaacataaaatatatgtacccatgtacagcctctttcaacagtttatcatatacagaagcacctaaataaaaatttcctttcccaccagcttttactcaaggataaaaatgataaatgtttactctgttaaaagacttggtgtggcactttctagtagcaaactataagctcaaggggccaatagcaagttttaaattacactagagacggggaaggggttaaaagtattttattataacaaaataattaagttcagatcaatctttaaaaggaaacagatctttctaggacaatgggaatactgatgggttcctcaactaccaatttgacagctgccaaaggccaacctcaatctttgtacagagatcaaatgggcaatgattctctataaaatataaacctatgtctaggaacgcatttctaagttctttgtaacatgcatctgagggtacatattgacttaacagggttaactttcacagtacatgcatataatatatatattttaatatttattttgtcaaactggatctttagttgtggcatgtgggatctagtaccctgaccaggggctgaactccaagcccctgcactgggagagtgaagtcttagccaccggaccaccagggaagtcccatataacgaaacctcctacagacactttataaaaaaaaatttacttttaatttttggccacaacatgaggcttttgggatcttagttccctaacaaggtattgaaccagagtccatggcagtgaatgcagagtcctaacaactggaccaccagggaattccccaaagcatatttttatacagaaaaaaaaaaaaaaaaaaaagcctaatttatctatccaacatatgtggatatttgtatttgggatttacttaaaatattatacaaatacttttcctctttcataaataagctgatttccctttaaccctttatgggccaacaaagtacagactcctctgacagtatttccatagtaccaaatgttggccttcaaaatacacaagtggtagaattagatttcttttgctcatctgttgtttgcagtgaacaaaaaagtactgcttttaattaaagttacatttgattaaaaaaacatatcaggtagtataagcccctggtagggataatagctgaatttcatttttattaagaaagctgatgttatacacataccagtggaatatgcagtgagttacccaggtctaaaggacattcaaagcaattattcattttatttcaaagtctgatgtgcaatatatcacggacaagttttccagagttataaacttccaaaaaaaaaaaaaaaatttcacccgtacgtatgttgaacatggaagctttttttacattgttaacacatttactgtgctggggatgttgttctttagtcgctaagttgtgtcccaacctgtgttgaccctgtggactgttgcctgccaggcacctctgtccatgggatttctcaggcaagaaaactggagtggggtgccatttcgttctccaggggaacttcccgacccagggatcaaacctgcattggcaggtggattctttaccacttggccaccagggaagcatgtgctggggatataaggactaaaaataataatcttttccttcaaacagaatatagcctagtagaaacaaatgttaattgctacaggagatggcacacactagtatggtgacaagagtaaaactgataaaagtcagtgtgtgtgaaaatgagcagaagtcccatgagatgtctgaattaggtgtcaacagaagggaaaaatattcaggccaacattaggaaggaaggatattacaatcaagaggatggcgcttctgaaaaggcctattagcaagctgcagcagtaaagtgtgctttactggagcagaatgtcttctgaatgaaaatcgaggagagaaggtgaggtttattattgaagcagctagaatctgtacaactataaatcgctatcaattaaaaattagagaaagaaaaaaagatgagatgtgtgaggccgaacaaggtaggccggggcaatccaggtcttcgatgtgtaataaggaacttggactgatctagaatggtgggaaaaccacacagggatttttagcagggatggtcctatgttcatttttgaaagatccatctttcaggaaagcaagaagggggaggagggaggatactagagaatagtgaggctcttatttcaaggatccaggagacagaggtgagagacgactgaaaaaggtgctagagaaggaggaacacttaagtttttcaacagcagcacgggcagaatcaaagagctgggggaaaacagctctctgctttgaacgagaggatggaggcatctgtgcaatgcagaaatttaataacagaagcaatttttggagacagatgacaaacttcacatggtaacactgagggttggagaggcctgggctacacctgatggaaatgtgctcaagagattgattaaatgtatagagctcagaagattagcagtcagggtgttaacttatccagaatatgagggaaacaaaaaagggaggaattcagacctggggaaacagcacagtacataggaaactccaaattttctaatacagcaagattttaaggcagacaaattatttaaattcaaggagtagaagaaactcgtgcgtgtgtgctaagccacttcagtcatgtcggattctttgcgaccccatgaattgtagcccgccaggctcccctgtccatggaattctccaggcaataatactggagtgggttgccataccctcctccagggggtcctcctgacccagagatcgaactcgggtctctgcattgcaggtggattctttaccgtccaagctactagggaagaaactcattggagtttaaatagccaaggctatttcctatgagtcaaaaagtcctcaactgttccacaactaaaaaacagatatcaagattagagagatgccactgctttctatagcaaagatgttggtaatcatgggaaataagaaacaagtatgttaaaaggctaaaggggtggtgtgggaggggaaggttgatatggttggaggccagtgtggaccttgaaatctcagaagaataaggcttgacttatttactgtggcagagaccagctaaatgtgttacttgtattctttcatatgacgtaaatttaagttggagtttttctttttttaaaaagcaaggatttgctatgtgaagaaggaaatgggggagagcaaggggaggaagggcagagggaacatctgaaaaggccaatcagcagaaaggatggttcttctgcctcttctccaccaatcatcttgtctttcattctaccacagccaacgcctctgggaagtcctggacttttcatcagaagcaacttcgttacttccgacttctcgttttcaagtaccccaaacaacagtcaatcccactaggatcatattccccatgcccctcacggctttcctttcctccttacctgtcttgggagtccatggttctccctcaccatgctgcttggaaattggttttaaatggaactcttctacctaatctgcccctgaatatggctgggcaccacccccaacatgctgactggcctcattttatttgtaactacaaccacaaatgctcccttaatcctggccagcaattctaatttccggagtcaattcacattcttatgcttctaggtatgtttcaaatgttcctgtttttccttaattgtctgctcttgcctggttggttttatatagcttctgggaggtaaaattcatatagcccacaattcacctatgtaaagggtgtagttcaatgttttttaaaatatattcagagttgggcaaccatcaaaataaattttagaacaatttttatcagctcaaaaagaaaccctgtattcattaactaccattccccatttcccccaacctccaggcaaccaacatcccatctcctgtctctatggacttggctattctggacatttaagtggaatcatagaatacgtgaccctttgtgactggattctttcacttagcattatcttttcaaggcccatccatgttatagcatgtataagtacttcatttcattaccaagtaatgttaaatggaaatgttttatttatcctagttggaatagcattaaaaaaaaggcatttagaaagactttttcatccacccacctaccaccaaacctaccctttacctgcacctgtatccgtattgctccttcagtctgtgaacatgtttggaacatgtgttccaaaggctaaatgaagccctacactcaaaccccaaatctaggcccccctctcatctatataagaatatcaacctaggaaatctctcttctttgttgcatcaaaaatttcccctctcctgggttttcatgctggagttttgtccatcttttagaaattaaaaaaaaaaaacaaaccctccctcactgtggatctcccttcagctctcaccaccattttaacgttcccccatatggcacatctcctcagagtaagatgtccagaatcactgtaccattgcctcatctctcattctctcctatacatatccttatacaggcttttgaacccatcactccaataaaaccgcattttccaaagtcacccagaagttttcattttgctaaaaccagttggcaagtctcggcgctcctctttgacccaacaatggcctctgatggttgctgtctcccctcctccgtaggaactttctttactcagcttccagagtacctccctctactgtttcctagctccctggctgtgcctttgctggatggaacagtacaggacagtggctaaaaacacgggtgttggaacaagggtatcttgaattctaggcactgccacatggagctgtgaccttgggcaagttacttcatctctttatgcctcttacgccctatctacgaaatggggataactgtgttgacttcaaaggattgtaaggcttaagtggttgatatatacaaactcttagttctctgtaccgtattttcaactgctaagtgctgcagtattcctgggctcatcctcgcactatatcccctccctaggtaatttcacgactggtggctgtaaatgtcatttatatttgctgacgccagaacttatctttaccagttgtttagctgacatctgcacctaaatgtcaaaacatccaacatatttaacttgacatcctcaccctaaacccactcctctgagattttcccatttcaggaatggcaattacactaccaaatgcttaggttaaaacaaacaaacaacaaaacgtagtcattcttagttcttctctcacgtatgtaagagagtcactttgaaggctctatcttcatccaaaatagtcccctcattccactcttatcaactcttgcagtttgctttctccagaatggccatatacaatcctttgaaaaatgaaaaccagttcacaacagtgttcaaacccacacttgctgttgcactctcgactgacgcttgataactggctctgaactcctcatggctgctcttatgttcaccttgctccagccctacagccctctgcagttttgttcccagtccaagctcccctgtcttctctaaataagatgctcttcctctgcatctacctgactctttcctcttattatttctcgctatattacctcctcagaagccttctccagccattttattcagaacagtacactgtacacaacattcctccaatcccgttctctttactctcttcacaagaatatcttcatgtgaaattattagtttacttattatctaagtccctgctagaatgtaagctccaggaagataggccttctcttgtcattcaggtatctctagtacccagaacggtgcctggtcctcagtaggtattgggagtaaacatgttgaacatatgaatgtatggtggtggcataaactgacaagataacctctcagggggcaaaaacagtctctccccagggtggtctctttccttacctatgaagacctgaaattttttttgaggaaagctgcaatgttctttcacaacctctttttccgctcccagtcgcagtttcactttttttgattccaaaagaatgccactgtggcactgtacatgaacctaattcgaaatctgttcacacaaggaaaaagatataccagccactctcacctctcccatcaacactctgagagcctctaggcatacagatatgtttgttgaaccactgaaagctgtcttttttcttttaaactacagaccttcaggaaattgaaataacagtacaacccaaacatgttgtacctttgcctagattcaccaattaataataattagggcataattattctgaagagacccccaggtgattcttctagcaggtactgtgttgggagctggggagaatgaaaaaaatgagctagttttcaaagaatgagagagaaagcacatgttagattaccttatacattactacaccccccccaaaaaaggaatggtagcaaagacttaaaagaaatttaagtttcaataatatatagtgtaagtacactaagatgtatatctatttttagcatggcataggacatgaaaaccctaattttaaatgaaaaaaaacagaaaccattatctcttaaaaatgacttcttggtgtttttttttgcaaaccaatctacaataaggtttgatcaattttcctatagatcttttatagttttttttttagaatttcagtttgtatacaaaagcataacaggtgtgacttaagagttaagagttgtactactggactcaagaagtctgggatatactggtaatccatcactgaatgggatcatccgtaattttcagtgttatctggaaaaaatcttacctgcaattcttcacagcattatccttgtctatcaaaaatcaatctagagcccagagtttctgtccctcctacctaccttaggcagcaaaagctgtcaggtttaaattaaaaagagactctttaggctggagttctgcagcctagaaggtgcagacagagatggagacaatgtgataagcacctttcacgtttttgtgcaagactttcccaagcttttgtttgacgtgcttcaccttctgagaaaatatagtatattcatgtataaattcgtacccaaagtatttgttgtggattgatcactattaatcattcaatgaacaatgtttttatacaaagttgaaagaagcactgtgatgagtattttggaagcatttcttaagtataaaacactagtggaataataaaatacaatatttagagtaccaattcaaatattttaaagctttcaaagaacacttttataggacaaaggaacatttggtagaccccctctaggttataatttaatataaccaacatcataaccaagtctacaataagaaaaaaattaaaatgcaaaaagtgttttaaaaattagacattaccattaaaaaaatattgagaattttcttcaggattcctttaaatgttattcacactagtagattggtgctctaatgttctaatttaaaatattaaaaattacaaaaaatatcaaaattctggggagaaaactctaaagctaagtgaaatcacaactcaaaatattaattttaaagtacagttgacccttgaaaaacacagatttgaactgtacggacccacttacacagactgctttcccagtaaatacgtactacagggtatgtggttggttgaatccacagatgtgggacctcggttactgagggccaactatacaattaaaagtggattttcaactgcacaggagttgaagcccctaatcccagcactgttcaagaatcaagtggaattacagaagttgacaataaaattgttcatcttcaagacagtattaaggtcacagctatggcataaaagcaaatatacctgattaatttacaaaccaatttggtctacataattcttgatgtgttcaaattttggaaaatcaaatgccaggcaaggaagtgtgaaaaatcaagcacgaaatacatcatactactgtccagcaattcagcttgcaggccactgatctgtgacttgtgctttaaatctttggtaacaaatattatcaataagatggaatcttacacatacccaattcttacttataaagtttaccatcagtttatatagcactgtgacaaaactggggagaatctctgtataataataattaatgaatgtatgtacctgacaagagaaaagactttaattttgcacaataggaatgagtctgactcagcttaatttcttccttgaaaagatattttggatatgctggtaacacaatagatatgtaacacaaacaaacatttttttgtgtattttttttattgtttggaacacgaaagtaacccaaatttcacattacaatgaaattttaaataagaatatgttgtacattgtattagagatacatgttatacataagtttggaaaagtaataaatacatacacttatacagtaaagagaatgtactgaattgctattatctttaatattccttctcttctaaatggtcaacaactgtaaactattaactttaatgaaatgaccactgctctagcaagctatttgggagtgtgaggtattaagcacagattcctttaaaatcaagtaataagttattattgtgcatcaaatactttttatgttttcagattatcggttactaaaacaataaaaaatctctagaagatggaggtggttctctacaaatctggtggtgtgggctacctcagcccaattccagaaacagagagtcatcacttctaaactaacacctacacttaagtctgatcattcagaaaactctaaaccaaaccatccttaaagcaccccactgcctcctgcataaccaagggccacaacagaattttggaagatctgttgaacattttactggcccctctagtttaaaaaataccattgccacctttcagaaattaggatccaagaactcagttaactctcaaggacatgtttacctttcattgtaagaaaacaatttgagtatcatgaataggataaatacagataccatatcatgctatttaaatgaaatgccactactatataaccaatacacattttattactaagccatgatggaacttctatatatgtgaacttaccacctggtttaatatactataaaaatatctgaggcaaccatgccaagatacatactttcctaaaaaagctacttttactgctgacaattagaacaatttaaaataaattatagctacagtaatataattttagaatttccaagtataaatactcttctttattctaaatattgtctatgatatttcttacctgtaataagcacccaccattcactgagtgcctactctgcgacaggccccatgtcaggtgtttatatatgtttgttagtccaactaaatcatcccaacaccctggtttaacatttttatttcttttctcacagatgaagaagctaaagtttagtctcacctcctaggcttaaacttttctgtatagtgtaatgttgctttctattatcgtaagagaaaacattagagcaccaagagaaaacatgaaagcatcatagttctagtcttctgtttcgtggctgacatcaacaatatccaacctacttactgatccttcagtactacaatactgtatgtgattactatattcctttatcaaaatgatggaattgtgatcagtcttttggataaatcctcctttatttgcatatacattaaaaagtctcatttctataaaaggtcaaaattcatgggatactcttttcaagatttttaattgaagggaaacagaagtatattttttcatgattcaaataaagctactgcattttacttaaaagtgcttatttgaaacaaaactgttcttatttttatgctgtatcagttattttaacctttctagatctggaacaacctttatttcctaaattttttgttttaaaagttaaggacaaagatcatcgtcagaggtgaagtataaacagccctacactgaaaagcatccatccatccacttaataaatgttcctctctcatggagcttccagtctggtgggtgggaggagatgggcatctaagcaggtatgttgcataacaaaaatgctaagaaatttgattatttttctagcactgactaactttgatttgttttgtttcacatgagtttaaatcacacatttcagtagtgataagaaattaagggcagagtttccaaaggctaaatgttaaataaaaggcaggatgtttattcttgtttgtttttggctgtgccatgtggcttgtgggatcttggttcccagcccagggactgaacctaagccacggcagtgaaagcctggaatcctaaccattaagccagcaggggaactccctgggttatttattcttgaaggctgttcaaaactagtggttatcaaagtcttagagatgatgaaatcttttcactgatttagtgaatttactaaacccagaaaaaaagcacaaatgcaagcaaacagtctcaggcgacctaatacctatggacaccagagtaggaaatttcatttcaatgagaatttgtaatcaggggcatgggtgtggggtgaaggaaagagggtgatcagaaaattctacccaacttagattcactgtgattcttatataatcgtcttattacaaatattggggggggggttgtaacaaaactgagatccaaagatacagaggtttcctggcccccagtctactactgttccttctactacgacttccatcggggcacagacctcttaagcaacttccccatcaaacaaatcattgtgcgttatacgatgaccactggacactacttgtgacaaattttaaccataaatcctcttttactattacccattcggtgtactaaaagaaataaaaatcaagtttattgttagcctaacctcagtcttggagagggcagaagacagcatgccatttaaaaacaaattaatttttattataaatgtagtacacgcaacaaagtaaaatttccaacagtcctgaaaactgcaggtgaaaagtaaaagtcctacatcacaaaccaacgtcccacagccctatatcccaggagtatagggctctttccttaaaaaaaatctaagattaggaaaacaaacatttgtgcacaaacacacacctttaaaaaatacaatgggttcacaggattgaaacattacaatagtaaggataaattaactacccattatcagaatcaagtgttaattatagttagcaataccacttcaaatataataatttcttataggatgaccactgtaacaagtatatggcatattcatttaaattcaagcaagcaagggtaaggcctcttaaagatgtgaacaatctaaaccatacttccttggatctctgaagttgagttgtgggtaaagaatacagcaggttaagtcttatcagagaaactgaggggtcagtggaaaagcattgcctcaggctgtgcaactgtcacttaggtaacaaagccattttattgcaatgtatcaaagatagtctctttgccagcctacagagaatgctatcaaagtccaggaattttaaatatataaaaattaatccagacagaaaaaaaaaactatgttgctttaaagaaaagtctgtatcttacttattatgccaggatgcctggggttttgttaatcatggactatgtaccaattcccgttcatagagattcgtctgatcacttttctataccaaattaagatgtgcaaatccaaacttttattcaagacagagaaacaaacatgatttcatttttgaggctgtctcttaagggtaggcttggtgaagaccatgtacacatatttaaaagaaagatcttcctccaaggaaaacagcctcagagaataatttaccaaaatgaacactgtttctaaaaagactaagttgggcaggggaaagaaaactaatgataaaaaaaatgaacttaccaagaagtgaaacaggctgggttacaggaggggtaggcagattcgtgggtgcagcaggtggcacagcagagccatacattttcacactgtcaccagactcggcgtttcctctagccccagacaccactgttggaatgggatttccaatagataagtcttttgtagtgtcttcatttataccagcgatagtagctaaggaatataattacatcaacatgtgaagctgaataattaattatcaccccggttaacattcttttgccatactacagaacctattactggtccattctccctcctactcccaactccaagaggacaagtgaacacaaagaaaaaacatgcttacagtttgggatgtttattggtggagtgtgaggaggaggaatggatactggtggagttataggaggtgggggtccaggaggaagaaaacctagaagaagaaaaacaacgccaacttaagttgtgtcactttatttcaggctcttaaaagagagtatcttctcaaataacttagtgtacctggtggcaaatgcattgggttgaatcctgggcgcaaaaacggtggcggaggtggaggaggaggaacaccaggcccaaagcctggaggtggaattcccaaaggaggcgtgaatgcaggtggctggagagcaccaactacaggaggtcctggctgatgcggtgggacctagaaagaaagagggaaatgaagccacgtatctagccaccctctcactcatatagtgcgtagagacaaagaaaataccttgctaaaaaacccagtatctctaaattgtgcttattatgtgaatatacttattagataacagtggtaatctgtacccacttcaaaacaatggaaactacatacttttccccctttctaaaaattctgggctgcttgctccatgtggcttgcaggatcttagttcccccaccagggattgaagctgcaactttgcagtgggagcatggagttctaaccattgagctaccaaggaatttccaggattcacagtctgccctctacttatcaaagcaaataccacactgtgattcaccatcacctatactggtgttctccagaatattaatgttaaaaaacgtctcacagtcaggtcaattaagtttgaggaatacaactctaagaaaagctaccaggtaatttgcactttaactgtgattaagatcacagttcctggggtcaaactgcctgctcccccttttaagtcattttgtgaccctgagaaagcgacttacactacactccacagacctcagtttactcatctataagatgaaaaagtgccaacctcacataattatggagattagagaataaataaatgttgagtgctaatgcctgacatgtaatacctaccaaacactttagttattgcttaaaaaaaaaagtatcaaccttaacagattagtcaagtttctttaagagagtgttgacatacactgaaacctgcactggaaggtcatatccagaaggtcgcgtaaagagtgccaatttggggaatccatttataaaatatcacagctaagaatgtaccaaagcaagtacttttctcctaacattgagaaaaatcaagaagctaggcaaccgccctgagatagcttagatttatcttattcagttttaatgtgagaaactgaggaaagaaggtactgaaagaaaagaaaaatctagtgaatcacacatgaaagcatggatcaagtacttctaattcttaccaacacattagttacttagctcttaacatgtagcaggaaaatcacatttcaagtcaaaaagtttatgaggtaataagatattgaaaatttgggcagatgtaaggcaaaatgatatttattctggtttttgaaagcatttataaatattaggtctgacataccaatatataagaaattaatatgcacatctatgtactcacatctttgagtatgaatctagacacacatcaacagtaagatttagaaaggtatcttttagacacttgaaagcttcaacaatgcccccagtactcttacctgtggaggcggtactgttatcggtgcgggaacaggaataggaggcacaggcacaggcagaggcttaggtatgggagacactggttctgtgtgtgaggtttcagctcctccattttgagcaacttcgttttcatgcttcttgggaattcccttccaatctatgaatagttaaagaaatataatcagaaagctctctgattttaatatcatcgacattaaaaaaaatcatttctgggtttaaaattataaactgaaaatgtaagcctttgttacatacatacatacatatatacacagatgtaatagttctattttttattattcccattttatgagagaggaaaacaaagtcacacacacttggcagaggcagagatgggattcaacccagatacatttggctcttaagtctctgttcttaaccacaatggtggaggaggaggtctttggatcaaagaccctgggagggaggagcagagttctttttatcctggaccagagatgcccagaacacctggagcactggccttcaataccagcctgcctgaacagaaacgcctagctctatccgtaggtgaaggcgctgtgcacgcgcagggaggtggtgtgtggggcaagtccagccccgcactcctgactgaagctctgtaatgtctgaaatatttactctattttgccatgccatcctgtgctcctctttgtcctgctatctatcattctggtcatgtccccacaggctggcattgtccccaatgaaaattccactatcagcctggcatttttaatatccaggcttcaaataactgcatctcctcatcttacatgtttacttttgatggcttctctggacatttaaacattttcaaagaaattattatgaggcagtggatcttactaacaatgttcagtttaagattcatctgatctgttaagttttttacactgaaaaagtctacttaagagccacttaatattataatgaataatgaaccccacaatcaatcagtaatcagagtctgcatgtctctcactaaatataagttgcataaaggcaaacgccacatttgtcttattcaccattgctcccttagtttataatggagagactagcacccacctagtgggtatttgaaaaatctcaaaaaacagttcctaaggcaaagaataaacatttgtcatagtactaccaaggaaataaataaattaaaaaaactaaatactactttacctggattaagtgtatcactgtccaacattcctccttcacagaaactctccaattcttcaggcttgactttgtcccatggaatataagtaacaccaagttctacatcccaatactgcttataatctgcctttattcctttgtttagggcccaggcaatctagtacatttgttaaaatataaaacggaagggagaagaaagtcataaactgagagataactgtttctcatgattccaatcactcagacttggtcagcaagagaacaatctggcctggctacccgtggggctcactcaaagtatctttggtgctaggaaatctggttaccctttcatcccatcttgtttgtcctagaaggaaatctgactgtcaatgatcttctttctcactcttccaatcacccctacccagacagcataaaactaaaagaaaagggaaaaatttatcatgcactggctgactgggcataagaaagtagggaacacttttaaaagtcttgggtacatcagaattactcaacattagacaaaatccttttgcagtgaaatccaagggtagaacagggtattgggactttaaggaaacactgactctggcccctcagaggaagaacacccatgcacctatatctttccctctatcttcagtgattatttttcatagttctgagatggcaaacttaaaaaaaaaaaaaaaaagacaaaattctaccacatacctagcgtttaaaattttatgttaactcttaggagataacctctttaaaaaaagatgcacatgtaataataccccagtgtccaaaactatagtttttaaaagtctcataagatatgttacatttaaaaaaaaaagaaccatcaatgataaaacagtacctttatggatttctggttcactttgtagttccctcggctcagtttttgcagggcacgataagcatcttgcctatgaaccataacaatataggcacaacctctgggaggaatcatctgctccaaaagattttaatattataaaacatgacaacaaaaccaaaaagtaacaagacataatatgaagcggtcagttccacccaccccacctccaactccctgcaccctctagagcctgtgttccataattggagtttaaaaaaatttgaaaattggtggttccagtttagcctcaactgccaatcatcaacaatctacagccccaagctttgttatataaaagtcatttgtagaaaaagattttagattaaatttggttatcaaaaaaatgtagttaaatgctaaacaaaaacttagagaacacctcaactccagccacatctcctacaaacctagaccaattttaacttaggtctcaagcccttaatttcgcaaaataacattaactacttctatctactgtcattaagaaatttaataaatactcacattaattgattcaattggaccaaactcttctaaaaggctggcaacatcctgctgagtagtccttttgtccagctgtcccacccagagtgtagtactacaaacttaaaataaaattataatcataaaaatatacacattccatactgagcagctctgtacttcacatgaaaaaaatcattacagaaaacatgcatgagttacgttatgatatccacaagtagaaagcaccatatgtgctatggctcaattgctcactcccatacaactctttccgatcccatggactgtagcctgccaggagcctctgtctatggaatttcccaggcaagaatactggagtgggttgccatttcctcctccaggggatcttcgtgacccagtctcttgtgtctcctgaaactacgggcagattctttaccactgagccacctggaaagcccaaaaccccatgtaagttttaaaaattacagtagtacttccagaaatggaaccaggatagtgaaaagtaaacggatgaggtgagaaaaaactcatcttttgaagacacatctgaagatttcatctatgtaaagagtcagagtagctgtcccttttaaactctcgagggtaatgatttttgtttcatgctgtgtcctagataagaagccctgcagagtcagaagttttatatatgcccaaatcatattatcaattaaaatttcattaacagctatggagttatatcaagaatatctactatagattattaaacatattctaaacatatcatgaaattcaggagataatgcaagctaacacatcctataaattgtgtatctttataaagtaagagggtattagtgttctggagggccccccccacctttcctcagtgtgtagaactagttaacaactatatttcatacacttgactcaagacacactattactcatcactgttagtttggctcacttctcattgctgcttcacagtcagctataggtacaaaagcaaatctaaaggtatacgccagagcacaaacagacaagacccaataaagcagtattttgctaactggttacaaagcatttaaaactcatgacattgaaaaaaaaatgcaggaaatgtgaatataaatgttcacgtaccactcgcggtttctgctttgatctgaggaaggcctttttgtcggcgctctctttccttctctcgatctcgtctttcttgggatcgagaccgaggagaatgtcggcgtctatctctggaccgagatcgagaacgtcgatgccgagaccttcgagatctagaaccagatcgagatcgtctccttttcggtgacctaatattttcaggacaagggagaatggattaatatacggaaataaagaaaacttcagcatgtgttaactggaagaggaaaaaatacaactaggtaatttaatgtaagatatgcaagaatttgtaagatgtgtaagaatttgacagtagggaattcattttaaggatttttaatatgctgaaagttagaaagcacatatataatatatacgagataagtttgctaacttataaaaaagtgtctctcatcttcgatacctctagtactattttaaatgacatctttgtaattaaaaagctaatgtcatcacaaagatatactgtgattgctattctctatcttctcagaaaagtctttttttctgtagcaattaaaaatatgtgatctgattatagtattccttaacttctttccacttttttttttggcttgataaattggtaaaggaactttgaatacataaatcttacaattccatgcgtatctgtaaacaggcattagagaaactcagagggaaaaaatactggttaagatgatttagtttataaaaattaataagtctcctacccccattccactcatacatacaaacataccaagtgttattttattagtcccatacatctgaaagcaatccaacttgatttaaatactaagtctctctaaacatgaacatctggattaacattttctataagctacctggatgctgatctagatcttgactttctgtgatcagatatgtgccgcttagcctcttgaacacaaggttgttctacttccatttcctttaaaaagaaaaacaaaatataaaacccatcattaaaggagaaaatggaaattataaacagaaaaagaggccaaaaacttacaaaatgctaaactacaaatctcttacccgtaaagttctcttttgattgagacctaattactagcttaacgatgactgggcatgagtggaaaaagttttttcatatggctcacaaacttagaagaaatacttatctacttctggaaattattttgtgaaggttaacatactgtgttaacaaaccatcacctaaagcaagtgaattaggcactgtttaagcattccatactctatctcaatcctcatgaaccctatgaaaatttatagtattattatgtccgcttcccaaaagaataagttaggtcacagagaaggtgaatatgtgcccacagttaacagtttttcttcatattcaaaactgaagatagaaagccaacaaacaggcaggaatctgcttgtaaatcaagggaaccaaaaaataatcagcaaccggagagtgaagctttacctgatgtgccttctgggtaagtggctcattttgtgcctgaaaggaagtttggaagggctgctgcacaggtggagttggaggaatcacgggctgagccatgggaggaaacggaggtgtaggaagaaggccaaagcctggcatctgtccattaggaggaagtggaaccttgtttgtttaaaacaaaaaaaattgtatgagtagattttaagtaactgctaccaaaaataattttttttaaattttagttaactttatataaaactaaaacatcttcaataaattttgatcaaggaaaaactatgacattcaaccatgaccgacaatttctacatatacaatttttatccaaaaaaaaactgcttatatccaagaacagagcttaaaaatcctacaactcattttaaaattaacacacgtcaggttttataatttaaaaacataccttcatttatatgaggaagcaatgtgacagactaaacttaaaactcagaggtactctactgcaaattttctctcttcaactttaaaggcaattaagctttaggggaggaaaagtatttagaagcactgacttctaagtttgttttaaaagttttactccaaggggagtttcagccaacatgcctatggctgaaatttatttagggtttgaaatatcataataatgagagtattatgtcacaatctaacaattttatacatgtaacattctaatgccaatacaatagaaagtataattgtaatatcactataatataaaaaagtctttctaaattattaataaactatcaataattgttaaacacttggagttaagttcataggtttcatctgtattttaaacaggatgataaaatattttttaaatttcacctatcaagaagtcagagagttttctcaagagaacacattggtcatagcaaacaccctcttccaacaagagaagactctacatggacatcaccagatggtcaacaccgaaatcagactgattatattctttgtagccaaagatggagaagctctatacagtcagtaaaaacaagaccaggagctgactgtagctcagatcatgaattcctctattatcaaattcagacttaaattgaataaagaagggaaaaccactagaccattcagtatgacctaaatcaatccctaacgattatacagtgggactgagaaatagatttaaaggactagatctgatagagtccctgatgaactatggatggaggttcttaacactgtacaggagacaaggagcaagaccatccccaagaaaaagaaatgcaaaaaagcaaaatggctgtctgaggaggccttacaaatagctgtgaaaagaagagaagcaaaaagcaaaggagaaaaggaaagatataagcatctgaatgcagagttccaaagaatagcaagaagagataagaaagcgttcctcagtgatcagtgcaaagaaatagaggaaaagaacagaatgggaaagaacagagatctcttcaagaaaattaagaggtaccaagggagtatttcatgcaaagatgggctcaataagggacagaaatggtatggacctaacagaagcagaaaatattaagaagaggtggcaagaatacacagaagaactgtacaaaaaatatcttcatgacccagataatcacgatagtgtgatcactcacctagagccagacatcctggaatatgaagtcaagtgggccttaggaagcatcactatgaacaaaactagtggatgtgatggaattccagttgagccatttcacatcctaaaagatgatgctgttaaagtgctcaatatgccagcaaatttggaaaactcagcagtggccacaggactggaaaaggtcagttttcattccaatcccaaagaaaggcaatgccaaagaatgctcaaactaccgcacaattgcactcatctcacacgctagtaatgctcaaaattctccaagctaagctaaaacaatacatgaaccgtgaacttccatatgttcaagctgaatttagaaaacgaagaggaaccagagaccaaattgctaacatccactggatcatcaaaaaagcaagagagttccagaaaaacatctatttctgctttattgactatgccaaagcctttgactgtgtggatcacaataaactgtggaaaattctgaaagagatgggaataccagaccacctgacctgcctcttgagaaatctgtatgcaggtcaggaagcaccagttagaactggacatggaacaacaaaactggttctaaataggaaaaggagtacgtcaaggctgtatagtgtcaccctgcttatttaacttatatgcagagtgcatcatgagaaatgctgggctggaggaatcacaagctggaatcaagatagctgggagaaatatcaacaacctcagatatgcagatgacaccacccttatggcagaaagtgaagaggagagtgaaaaagttggcttaaagttcaagattcagaaaactaagatcatggcatctggtcccatcactgcacagcaaatagatggggaaacagtggctgactttattttttggggccccagaatcactgcagatggtgacggcagccatgaaattaaaagacgcttactccttggaaggaaagttatgaccaatctagacagcatattaaaaagcagagacattactttgccaacaaaggtccatctagtcaaggctatggtttttccagcagtcacgtatggatgtgagagttggactataaagaaagcttagtgtcaaagaactgatgcttttgaactgtggtgttggagaagactcttgagagtcccttgaactgcaaggaggtccaaccagtccatcctaaaggagatcagtcctgggtcattggaaggaatgatgctgaagctgaaactccaatactttggccacatgatgcaaagaactgactcatttgaaaagaccctgatgctgggaaagattgagggcagggggaagagatgacagaggatgagatggttggatggcatcaccagctctacagacaagagtctgggtaaactctgggagttgctgatagacagggaggcctggtgtgctgcagtccatggggtgacagagagtcagacacgactgagcgactgaactgaactgatcaacaagtcactgaatcacaatgtcagtttcatatgaccaaataaaagaatatctcaaaatatgatggattcaattccagaccactttaataaagtgagtcacataaatattttggttttcacagcatttaaaacttatgctcatacttaactgcagttcagtaagtgtgcaatatatccaaataaaacaatgtacatgctttaactaaaaagtactatcttgctaaaaaaaaaaagccaattatcatttgagaacccatggttgccataaaccttcaatttgttaaaaaaaataaagtgtaggatctgtgagaaatgaaaaaaacatggtatgcctttatatataatggattgaacatgatacagataagaaaatgaatatattttaaaaggtttcttagaacactttctaaattaagtctaaaaggagcatttctcaaaggttggctgtacaacagaatcgtcacataattaaaataaataaagatcctctaagattgactatagcaccagaagtctaggatatgtattttgtagtatgtttctccaattgagatgtacagacaagtttagaaaactctgaattagaggatttattaaaataaatccaatgaacaaatttagtctaacttcctgaaattctccagtatgatgtcctcatcttatactgcagatttcaaactatattcctgaatgctgaagagctgaaagccctctaaagcaacaagtcacacaacattaataaagaaaaaatggagatttccctggcagtccagtggttaagactctgtgctcccaatgcaggcagcacaggttcaacccatggctggggaactaagatcctgcataacacagtatactgcaaaaattaacaaataaaagggaaaaggggagcggggggaggcttctcagaaggggaaatgctgtataactaaataggtccgttccttaaaatagaaccaacaatctctctctcaactatttaaataaaaatacctattaaattattggcacgaatatttagcatccttgttttaattaaagcaaaaaagcaactcaaaccagttatgtgcttgacagcctttagtacagcttaaggactatttagccacccacacaggtaaatactactactctggcaagtgcagcccagatgcgctaatgaacacatctttagtaatcagaaatgcctccacctgatggtgcactggatcctgcggcactgccatcattcgaggcggaaactggtccatggtctgatgttgggcatatgttggttgtggcatgccgtcgccaggaaacccactaaaagagataagcagtcttctttttacccattcaaaaacacatcattcttggccacatttacgctacagaaacttacagaatgctgttcaggagttgttaacaatcaacattttactgaatcatttatttatttgcctatattaacttaaaaactcagcattattcccaaaataaaagtcattttttattgtaaatctgacaggatcccctccccattcagaagaaatccccaaataccacaatttaaaaaagaattttagaagatgctatatgaaaaatgactgttattaagtgttacttgcattatgccttgtaatgactataaaagttccgaggaatcaaaagaaagagacgtacaagggtgcctgtggaggggaggcagtgggcgcagccacagaaggtgcggcggcggcggcaggcgtagtgggcacgacagcggcaggagtaggtgttgtggtggccgaggcggcaacagcatcttctttcttggattcttccacagcttctggctcatcatcataatcaaatctatcaagtagcttctgcaagaggtatgccaatattccgttttaaaattcaggttgtgattcactgcacaaaaaaactttataaaaacagacattcaccatcatccataatcctgctatcctgtgatgtacaatgtcatcttcccacgtgtctcttagggactctggtgcatagacaatttttacacaaatgccattctgaaaagacccttttaaaaatggtttttcttccaattctaaatacagtgtttccttttttttttctattttctatattataactaatttagcagtagaaagattttacaaaaacattttcctagactaaaaactttgcacacatgaaaatgggtatatatttttggtcggctttgtaaaatgtacacaaagaaaaaccatcttatccaatcttataactatcttataaattctgctcactcaagaatatgaaaaaaagagagaacggcacagacaaggctacaaaatctacctgtgcccttgcttctttcttaaaactccatagctcaccttttaccagaaacttccattaaaacaaaaacagaaagcaaaaaccaaccagtgtactccacaggatcacatgtctagagagtcatttgaaatataattacatttattcagaataaggaatcaaagtattgggctagcccaaaagcttgttcgggtttttccttacaatgttacacaaccactactgtgttttggtaaattatacataatacttcatcacaagaaacatgcaatgtagatatagtttcctcttcttacagacaaggagactaaggtcaggtaattaagaaacataacctagactgtacagttatatatagtagagtctagatgtggacaatagtctttttttaacctcagtccctggcattcaataaggcagtcttttcctctcagggtatgaccttcccgttcatggatttccaatctcaaactcctaaatttgtgctgttctgtgatagttctgcctggaaattctggttctactttactggacgacagatttctaaattgcttctttcttcataaatctgggccacatgattaaaaattctgattataattgagagacccaacatggcttaggcaccttgttgctttttgcacatgaggttaatttaaccctcaaggaagtaaaaaaaaaaaaaaggtactaccattgctcttttacagaggtatacagtaaatgtttaagtaactcaacatcaatagagtcaatgacaggagccaaaattaaaactcgggtctagggcgtctctgatggctcaggggtgaagactctgcctgccagtgaaagagacacaggtttgatccctggtctgggaagattccatatgccatggagcagctaagcctgtgtgccacaactaacgaggctgtgctcaagagcccaagagctgcagctactgcagcctgcatgtcctagggcctgtgctccacaacaagaaaagccaacacgaggagactagagagtagcccctgcttgctgcaactagaaaaagcctgcacagcaacgaacactcggcatagccaaaactaaataaaattaaaaacaaaacaaaacaaaacaacttaggtttaaactatctacaaaaacaaacaaaagaactctctgcagtttatcacatatagacatgttccttaaaagttttacaactcatacccattgctctgggaaaacatctgaagcaattaaaaaatttaactgagccctactatctaaaaagatatttctgctgcttttaaggaaactgaacatctatgaagtggctgaaacagacaagctgttcccagtcagctgtttgactagcttaaaatagaccttttcagtcaaaagcaaagcacaattcctttttctaaatttaatgtaactaacaaacactgatcaatccacttaacaacaaaatataaatgccactgctagcactgctattactcaacattttatttttctggaagtcctagccatcagacagtaaaaaaaaagaaacaggtctagatgttgaaggggaaaagtcaaatttagcagcctacaaaacctgagagaaccaactagaaaaaacaaagataatttacaagataacatgaaaactcagtagtttccctcgacagcatcaattgggcttccagcgtggctcagcagtgaagaatctgcctggaatgcaggggccatagcaggtgtttgatccctgggttgggaagatcccttggaggaggaaatggcaacccactccagtattcttgcctggagaatcccatggacggacgagcctagtgggctacagttcacaggattgcaaagagttggacatggaagtgttatgaaacactaaacacgaaaaatgagtaaattatctaagaataaatgaaacaaatagcctggggttcaatccctggttggggaactaagatcctttaagctgcatggagcagcaaagaaaaagaaaagtgactaacatttaaattagtggactgtgaataaagaaacaccttccataatatcggtgtgcctcaaccaatcagtcaaaggccttatagcagggtttcccaaagatggcattctcaagacagcaacaggaaaaccttttgccttgcacaatttagactcaagactgcagcattaactcttacctggatttccagcctgacactctaacttatacttgacaactacatgaaccaatcccttaaaaaaaatcccccccttctcccctttgtgtgtctgtgcctgtaactggttctgtttctctggaacataccaattcacatgcccaagaataggcaaggaatgtctgaaaaacaataaaggcagaaaacacatccagaaatgaactgtaagttacaagtgtttaaactgctatgatgccaaaacaaacacagatactagtgggacaaaatggtatctagagacagacatcgaaaaaagtgtatgacaaaaattgtgagggagaattggctatttccaaaaatataaaggtttaactattttgaactatatgctaatataagttcttgatacactgagacaaacataaaaaacagaaatataaaactactaggagaaatagagaatttttaatacaagtggggagaattttcccaatcacaacacagaacagaagactaaaaaaccacagtacttaacattttatattcacatatgcagaggaaacaggtctgaaaaaccatacacaaatcagtggaactgatttcccttttcactccagaactttctgtattatctgcatttctttcccctaaaagcatgtacttcttttgtactcaaaaattttaatccaaccttcttttaatcagtagtcactcataaatcatatagatagaacaagcagtaatttccatatggattcttaatattaactactagcaacagttactgtatcttagaatgctagaaagaaacatattttagagatgattaaaagatagttctttctaggattatcaaacttcggtgttttttgtactgcaacttgtaaaatgaaattaaattttatatagtcatatatagacaagacacaaacaggtaagagtggagttgtttaggcaaacatttcaacaggaagctctgagctgtgcattttcaacacatctatacccttagtgggagcgccttaaacatacctgaggcccaaaagagaagtctgaagacactaaaccaacccaaactctcatattatagataaggtaactaatgttttcaacaacagaaaacagaaagcaacttaaatgtctttcaacagggggaatggttaaactgatatgcccatgtaatggaataataatatcctaatgagcactcagtacatacttacatctattaaccttaaccaccacccagagacgtgaggattaagacgaaaaataagccagttaaaaacaatgtgtatatatatttattcatatagattaaaaatacctgtttttatatatgtatatacacacacatacacacaaacacagatacacataatgaccaaaaaacaaaagaccatatccacaggaaatcaattctgaaaagatatatagcagaatgttacagtagttatccctgagtaagggggttaatggtgaatgttctgtttcctttatactgtttatttttctcttatattgaaaattctgcaatgagtatatatcacatttataaccaagaataagaatcaatgttttgatgtcgaggggggaaaatccctcaaataactaaatgaacaatccaggtaagtcagaaaagggttaacttctacagagtgataaacaatgggatgagttatgtgagagaagcataccttgtcaaatgcagttttttgttcaggtggggggaaagcagctttttgttcaggtggttgtgtaggagctgtctttaactgagctgtgatagcctgaacctgagccatcacggcattgtcaatggcaggagactgtggttttggaggctgttgaaaagtctgaaggatctgctgaagcttaaagaatgggaaaactgataaaccacacaacaaaggataatcatagtatcaaaagttaattcactaaaaaaaaaatcttaatggtgaatcaaaatagtacaggcatggaggaacttggaaaaaggaaccaaccttttagtaatggttaagtttatcttgaatgaatgtatcagggatacaatgtgtgtcacttaaggttaaaagccaatggtagacaatgatggtcagagagaagagaaaatacactgaattgtgaacaatatatatatgttttctaaaaaagtataaaacaatcatctgcatcaatccatataactttgtaactagcgctgtgagcaacttcaccacccttagagctccgcagttctctacaaaggggcacactattcctcagggtgctggtcccttgcttacctctcccacatttcccctgtatccttgtgaattcaccttcctcgcaaaggctttttccagtagatacattccctcctcacaatgtgctcggtaaccaggaatgtaaaataagaactgacaatagtacctaactgcaaactatttaatctttggacagacaatttacctgttgaccttgagttgtctgaaacagttgggccacagcagcaaaagcatcagagctgggcaactgtggtacagttggtacagagtttgtagtggcttgtgggggttcagaagaaactttaactggaggtggaggtgaacctaaaaaagaaaagatcattaaggcctcaaaaacttttaacttctaaatatttcctttaagctccattaagcttctttactaaaacaatactccattcagtttaacatacagtaaaaaatatagattatggtattacagcctatactgtaacaagcactgaatactttttattagaaataataatgatgggaagaatactttatcttccaagatgtaaactcaagttccttcttacagaaaaattccatcactataaactgattccaaacatatcatgtacaaaaaaatgatacaattctctaagtgcacagacacacctgaccttaccttcattattagtaacattttctgttaccggagcagcattactggttcctgctgccatgtccaaaagaggctgaataatttcaattttgaatactccatttttttgccaaaggtttaatacgcgaactattttactctgttatgtgaaaaaaacacgaatatacaataagtattagcataaataattatacctcttatgaaaagacagaacaaaccaccataggctaacatttccatgctacatttgtttcataaatagagaacaatctatcatcagaattacagcctcattaaatgactctaacgggccttccttcagtagtgtaatccagggtgagaaacagggagaggaaaaaaacaaacaattaacctagagaatcagaagaaatgcattagaattacttgaaattttcatatttatgattacaaagaaaccaaaaaattcagttatctaagaagagtaaaatccaggatgattttaatagttaaaatatttaacacaattaactggcctctaattgctaggtaagttgttttgtgggctaccaaatttgaaggagatccagagaaaatgtgttattcatggttacaactcttatctcctactctaggaatgaacttttctcttgtacatcttttccacaagagcattcctccaagaatacagagaatccataacacgcaaatttatatgtcatttattatataggctctagtcttcgttattctgagcttaccagtgtatttctcctatctattaagagtctaattttttttgtctatgtttttctatctttttacagtacagagtaaaaccagctataaatgtgaggaattaaatacagtagtctgattgctaatgaatatcatttatacttcaacatctctatatgatggggaaagtcaatgattggtcccttccttgtggaataaacaacaatttgacataagcactgtcctcctctactgcagaatttctttaccattcaatcacaagaaatctttctaataatgttttctttaaagaaagatgatgctcctttttttccagtggtcatgtatggatgtgagagttggactgtgaagaaagctgagtgccgaagaactgatgcttttgaactgtggtgttggagaagactcttgagagtcccttggactgcaaggagatccaaccagtccatcctaaaggagatcagtcctgggtgttctttggaaggactgatgctgaagctgaaactccagtactctggcctcctcatgcgaagagttgactcactgggaaagactctgatgcttggagggattgggggcaggaggagaaagggatgacagaggatgagatggctggatggcatcactgattcgatggacatgagtttgagtagactccaggagttggtgatggacagggaggcctggcgtgctgcgattcatggggtcgcaaagagtcatacacgactgagcaactgaactgaattgaactgatgctccttttttacttcaatagtacaacatttctaagacttcacaagaaaatagatatgactactacagaaaaaaaactgcgttttgtttcaagttcacagagatcactatgtgatcaacctttctaataatactgctgccgctaagtcgcttcagtggtgtccaactctgtacaatcccatagatggaagccaaccaggctcccccatccctgggattctccaggcaagagcactggagtggtctgccatttcctaataatacagtaggctttaaatacctaatatatatttaagaataggataagaatacaagtttaatttaaaaattataaactataccttatcttcagatggacaaagatacagatattggaatgtggcagttatgtttttagagaatcttggcccaaaaacatctttatcagttccaaactgatgacgagactgtcgcacaattgagtcaattacatataatcctggaaccttgtattctggtttacactacaaagattaaagatgtaaagtcaatacaagaaaagtaaatcacaatctgacacccattaatctcactcttatgaaactatatatccaaggttatttctacagaaataactaaagttattaatcaagtaattaaataactacttaaatgttaaattctcttactggctagcccacaggtctgtagagaactaccattctcttaatgtttcagactcccaatattttacttttttctgatccctctgtcctccccccattccaacttcctagaatcagccttactttaccaatgcctaagtcacctccatacagatctatttattaaggaaaaatctactctcattcattatgctcaaaaaaataacttttaacttttaaaatcatcaaaaagccaattttaaccaaaatattaatttcaattctaataaagtacagtatcagagaaacaaaacccaaaaggcaaagtcattcttggccttacaaactgacaagatgaaatgaatagacagacatctgcaaacatttctggtggtacaaccttcatgaaaaataatttagcaataaacacaaagccttgtttgatccaacaactctatttctagaaatttatactaaggaaaacagacttcatatttccaatgcagggggcacagcttgatccctggttggggaactaagattccacaagccatatggcatggccaaaaaagttaaaaaaaaaaaaaaaaaaaaaaaggtacagctctaggttgggagagaagacaatgatgtctaagtctcccttctcagtcctttactgacatagacatgtgctgatgttacatatgttatcaaacaacatataactgtagaagtgaaaagtggtttaattatgatgggagaaagggaagttgaaaacaccagagtgatttcatttgaagtactcctagataagttaaaagtcaacagagtcgtcagggcaatggggagagaaggctcaagcagacaaaaaactatttcaaatcctgactcatagtaagtactcaatcaacagtattgctatacatttttgttttgttatgaaacaaaaaaacaagacttccagtgacaacttttctgtagagtgactttagaagtaattattcaaattacaactcacaaagtacaatactgatcataactaaaatgaggtaataataaaatggatagttaccttttttatgaacttttctactatttgaaccacatgcttataaagctgaaaagaacaaaaagaatattatccagctaacacacttttctgttcaatacatttcctataattagaaaatacctaaaacctcaaaatttgtacaatttgaataattctcagggtaatactgaaagaacccaggtaaataatccatagtcaacaactcaaaaaattcttaacaaatcagaaagaaactattaactaaaacagaaactacaaaaacctaccaaaagattcttttcttccatttttaatcaataaatcttcataaaacagttcatcaagtgactttatgggagagagaagaacaatggaactggaactaaataatgcagtttttaaagagactcacttttttaaagtgtgatcttgggtaagacattcaatttcatgaagtctgaagtttttaaataaaaataaagctaatactccactgatctattatggtaagaattaaatggaataaaacaaacaataacaacaaaaaccctctgtcattctcctcacctcaatgagttcaacttttttttagcaccacacataaacaaggtaattatgtgaggtgatggatgtgtcaattagtataagctaatcatttcacaatgtacatgtacatcaaaccgtgctctattacatactactaaatctgtcaactatacctcaataaaagtaaaaaaatataaagaggaaatacaacataacagattctgaagtatgttacaatgtagacacatcacacagttgtaattatgtactttcagcaaaacttggttagtgctctctgacttaggcctgaactacttcacaatatgaaacctcaaatttaacaataatattttcaacattttaaaaacactttccaaattaatatatttcttttactcttacctttatagctttaatagcagctttcgtgatgagaatcatcttggctcgagagatgggaggtttcatatccataagtgaaaagagcttattaaaaaaaaaaaaaaaaaggaaaaaagttttaattaaaagtaaaattagaggtttacccttcatttcgacaaatatatttgtaactaaaagaataataaaatttctgaaactaggtttaataatttgtctgaaaaagaaaaaccaagagctttcttacatactagcatcaccactttgaaaacagaatgggaaaagattatgctaaaatcagcaaaaaagggggaaaaggtaaaaaaattgacaaaatctgtaacagaaaattcataaaaccctactgaagaactcaaaactgatttgaatggaaacaaacgcaccatgttcctatactgaaaatggcaatattgtgattcaatatttaatatttcaaatccaaacctcactgagattttggaggacttcaaataattctgatgttcacttggagatacacatgtattacatcaggtaagaaatttaacatgtcattataaaaactgaatccacaatttcttgataagtcaggaataaaaatgacaccatatttaacaaatttcactacagtaaatctaacaatcagggagtcccaggagatgaaaccacacaggcacacacctttcccctaaagtttaagcccaaccaagatataatgagagcccataaagagtcataatgataaaattctgacattaagaagcttatatctagtttcttaaaatcttgtttttgttttaaccataggcatacatactcttctaaaaatacattttgaaataagtttcagggtcttctaagcattatcaatcttatatgaatcatatttccatttctctccaatttcaaatatggaacccctaagacatagaccatctttaccagatacctactaagaaggtaccctaaagaacaaaagtctccttttccagaataaatagtcctacctgtcaacaaaatactctggcaacagaatttttgcactttttcaaaactacagacacaatgggactatagatagtggtaacagtaatttttttaagaagtatgcgatacaagatatgatcaatctaagaaccaaaaacgtactctgtttaagcagagaaaggtagaattttttgataaataatactaagatgaatttgagtaaactctgggagattgtgaaggacaggggagcctggcatgctgtagctcatggggtcacaaagagttggacatgacttaggactgaacaagaacaacaatactaaaatacagagaatgggaaaaacaaagatactaacacagagactgattttttttttttaaggcattatctaattcaggtcatgattctttatttccaacacaataaaaattctccatgaatataaatgctcactaattgaaaaacaactagagacagtaatctttaaaactatataaaacaatgagaaggtaagaaacgatttaaagtattttaactccaacacaaactgaaaaatatatgcagctcacagtttataaaagggcatattctgcccatttctaagttacaaaagctattgagacagttatttattactacagttctatttccttttctggatcttaaagcagagaaacaggatacaaaaaagttgatacacgatcttaagaatgagtaacagcgagaactacttttctggccattaaaagcttgctgctgctgctaagtcgcttcagtcgtgtctgactctgcgaccccatggacagcagcccaacaggctcccccatccctgggattctccaggcaagaacactggagtgggttgccatttccttctccaatgcatgaaagggaaaagtgagagtgaagtcgctcagtcgtgtctgactcttagcaaccccatggcctgcagcctaccaggctcctccgtccatgggattttccaggcaagagtactggagtggggtgccattgccttctccgggcattaaaagcttagagaatcatatttctctgaagcctaagccagcacgaatattcattcaatgtcctacattcttgattatttctacagtaaggaactccccattaaaaaaaaaaaaaaaaaccaccaccacacacacacacacacacacacacacacacacacaaaaaccccagccaactgaggagacaagacagattagtgttatattctgatgaaatgctctacagtttacatttaaatcatttttcttaaaaaattaaaatacagactataccatatagcagtataactatcactcaggcagtaaaccagcaagagagcatttaagtgctaccgtttaagagacagacagaggaagggtatttattccactaaagaaggtgcaactcaagaaaagtggaaggaagcaacactaagtgcctaagtataaggtggtgcatcattttatttaatcacattaacaattaacatagattgtcacagctgttttcagctgataccaaaaaggattacatctgctgttaaatgattcccagggaatgtgtctggactagaatttgttggttgtaaagctcacaatccttaagattatcagttcagttcagtccctcagtcgtgtccaactctgtgaccccatgactgcagcacgccaggcttccctgtccatcaccaacttctggagcttactcaaactcatgtccattgagtcagtgatgccgtccaaccacctcattctctgtcgtccccttcttctgccttcaatctttcccagcatcagggtcttttccagtgagtcagttctttgcatcaagtggccaaagtattggagtttcagcttcagcatcagtccttcccatgattactcaggcctattatccttcagaatggactggctggatctccttgcaatccaagggactctcaagagtcttctccaataccatagtttgaaagcatcaattcttcggcactcagctttctttatagtccaactctcacatccatacacgactactggaaaaaccatatagtcaactccttatacaatgctgttgttgtaaatacgtgcaaagaccattaactatgatggacaatgcaagcaaaatatcaagtaggcatctgtgctcatctctctctatatatattgcactggttcagggataacgatgagacatactgaatttaacttgggatgcctactgaaaatccaggcagagatttcagcagactggaatatggatcttgaaaaagcagaggtcctgctagaaattgagaggttacagaatcaaaaccatgaagatgagtaagaagggaacaaagatacaactaacgacaatataccaaatatttcaatgtagcacagaaaagggggcaacacaaaagaacaccaggacaaatgccagaaactaaacctttaatgctatagtttttttcgtatggcttgactagcattacatcatgtgaaatgccaggctggatgaagcacaaactggaatcaagattgctgggagaaatatcaataacctcagatatacagatgatatcacccttatggcagaaagcaaagaggacccgaagagcctcttgatgaaagtgaaagttgctcagtagtatccgactctttgcgaccccatggactgtagcccaccaggctcctctgtccatggaattctccaggccagaatactggagtgggtaacctttccctcctccaggggatcttcccaacccagggatcaaacccaggtctcccacattgtaagcagattctttaccagctgagccacatggtaagcccaaaagtgaaaaaggaagagtgaaaaagctgccttaaaacttaacatcaaaaaacctaagattatggcatccaggcccatcaattcatgacaaacagatggagaaataatggaaacagtgagagactttcttttcttggactccaaaatcactgcagatggtgactgtagccatgaaattaaaagacacttgctccttagaagaaaagttatgaccaatctagacagcatattcaaaagcagagacattactttgccatcaaaggtccgtctagttgaggctatggtttttccagtggtcatgtatggatgtgagagatggactataaagaaagctgagtgccgaagagttgatgcttttgaactgtggtgttggagaagactcttgagagtcccttggactgcaaggagagccaaccagtccatcctaaaggaaatcaatcctgaatgttcactggaaggactgatgctgaagctgaaactccaatactctggccacctgatgtgaagaactgactcatttgaaaagaccctgatgctgggaaagattgaaggcagaaggagaaggggacgacagaggatgagacagttggatggcatcaccgactcaatggacatgagtttgagcaagctccgggagttggtgatggacagggaagcctggtgtgctgcagtccatgtggttgcaaagagtcagacacaactgagcgactgaactgaataactagtattatcatctgcagctgggaaaatgctcaataaacatcactaggtgcagcattctctttgctactacacatctgcattcagaattaatgtgatctgtcaaaaaaacaaaaaaaaaagtatcaacgcagccacagaaaatgatgcaattctcttatacaggataatagcagcagtaggccccaaaaggtacaaaacctccttagaaagccttagtaagaaaaacatacttgccagctaacagacataagtttgttttttttgttgtcatcagttgaatgactattagaaaacctaaacatgaacactgttctgctgggtgcctgatatacaaagtattctaaaaattacaagaaaaaaaaatcactcacaatgattcctaatatcaataaagaacaattttaaatttggcccatgacacctgttgaattcataaggtttgagggttagtcaaaataacatgatactctgctatttattgacagcataaactctgacaagtttagttaaacttttctgaatttcaatgatgtatgaaaaagaggattagtaatattcaattcactgttgggattccctggtggctcagaggttaaagcatctgcctgcaatgcaggagacctgggttcgatccctgggtcgggaagatcccctggagaaggaaatggcaacccacaccagtattcttgcctggagaatcctatggacggaggagcctggtgggctgcaagtccacggggttgcaaagagtcggacacgactgagcgacttcactttcataaaactgttaggattaaaggagataatgtatattatcttggcctagatctgacacataaatggctcggtaaaaagaagtacataatgccctgggaatcttaacatagatctcaagtttaagtttttgtcatgaaactgaaggtgttagtggttcagttgtgtccaactctttgtgacccatgaactgcagcctgccaggcttctctgtccatggaattcttcagccaagagtactggagtgggtatccattcctttcaggggatctttcccacccgggattgaaccaaggtctcctgcatttgcaagtggattctttaccaggtaagccaccagggaagcccaatttttttattatggcttagcataaaaactgtattgtgttacatctactgttcaagtgctgcatttggagaaattttctctatactgaaaacaaagcagtatcaaagacttttacagctttatagcaccttactacctaatttagtattcatactaaactcagaactgctttcacaatatatctggcaggtcccatgttagttcacaggcttactaactcataactaatcagctccaacagttacagctgtcatctttgtactgaccccaaatctcccttctgataaccttccctcccttttcctgctctaattctgcctctggagcacagaacagtagtgatctttctcatttgagaaagtaaacataactaagcatgttttcttatctgcttcaactattagccaaatgatatgatttctagatctgactatactggctaattccttttaaaagtatgatacaacaaaataaagagggcctggatatattcctgcagaatctagtgggttgtcttttgtatcagtttcctcttcctgcaggaacacattaccacaaactcagtagcttaaaacaacacttttggaattcacaacctcattagtctgaaatcaaggcattggtagggctgccttccttctgggcactctaggtcaaaatctatttctttccttttctagccaaagggtgcctaaattcctttggctcttccatcttcaaagctggcagcatagcatcttctgtccttccttagcctctgctttcactgtacatcactttctctgacttttcatgtctctctcatttaaggacccttggggttacactgggttcatccagataacatgggacaattaactcaaacctttaatcacatctgcaaagtctcttttgccaagtaaggtaacacattcaaaggttctaggattcagaacatggtcactctggggtaggggagatcatttattattattatttttcaaaatactgcttagttggggcttccctggtggtccagtggataggagtctccctaccaatggaggggtcataggctcaatccctggtcttagatcccataagcctgtgctccacaacaggagaagccattgcaatgagaggcccacgttccgcaataaacagtagccctccctcgccacaactagggaaagccaatgaagcaatgaagatccagcgcagtttaaatatatagtgctcaattcattattaactcatatttataagcgaccaaaaccctcagactgtttcactgcaatctttatcagaactagaacttcatgttgattttatgttggtttctgacagtccttcaatctacttaggtagtctagaaatcactttctgttttcaacgtagcagctattccaattagtttgtaactttcatgaatctgctatatagatggctttttccaacaccatggtttttttaaaattagaaagacctatacttgcaacttgtaggaagactttatctaataatccgtggaccctgacagttagctaaaattcacttaacaatattctcaacttatcaatattttttctaatttattcaagatgaaatcatgacaaatatctgaaatatatggagtcctcactagacgaaacacactttatgaaagaaaaatgtttgatttggtctgtgagaatctgttctagctccaagtgactagaaatctttaggcagaatctctttcaatgggatacttaccccatcttatcctcttaaacttactataatgaattatacttgagatatctagtattccttcctttgctattatgatctccatgatgacaaattctgccttaagctcctgttattaataattacaaagtttaaagaaaaaatttggatgctttcaaaaatacatacacatattcacagtaataggctggtactcaaatctcccttctgacagatcaagttatcaaagtgttcgagtctacaatcttcctccctcttttgttcatttgtctcatcaaatctgatacattggcttcaaccaaatcaagagttaaacccaacttaacttaaatgtttactggtaaaatatactttataaaagcacacattaaatttaacaaaagaaaacgtaggggggaaatcttaaaatcatctccacaaagatgctttgtccctttaattatagcctgaagacagctctataaaatactgctagaacaaccaggtaagagatactttacagtctcttctaacctggcatttcattttatgcctttaccaaagctttgtctgagctaattctttaatactgggcacttaatgtgaccgtgggtatgtatgtgagacaaagagacagagagagagagttgggggtgtgggtgggcagggaaggaaagaagagctgcaagccaagcatgttagacaagtaccattataccactctaccctaaagcagaatactgtgcatgagttaatcaataacaaacactaagaaaaacaataaaactggaatgtacaaagtataataaatagagccagaaactaattaacaaacatggaaaaaaatgttcagtcttaccaatagtcaaaaaggtacaaattaagacaatgagataacagttcacttatgtatctaatgggcatgagtgtagattagcaaaaagcaaagaaagcactctgctgatgagaactaatggggaagtttcaatttcagagagaaatctaaagctatatatatcaagaactcaaaaagtctgtatcttttaaaccaacaattccacttttagaaatttatctaaattagatgttccccaaattcccaagatggcttttaaaatcagaaagcaattcatgttatcactggtaaccatacccaaacactagtggaagggggaaaaaagactgacatactctaaaatgttaaagatatttggtgggatattttcttacttaaatttacctaatttgcattagttcaaaaataaataaattagaattcatgggttaaaaatggaaaactttacatttgtgtctgagacacagaaatgcatttctccaacttgattgtaaatacataagatcatcattaccaggtacaacttgtctgcggagtaaaccatatctttgaagttaacacatatgtttaaattaatgtcttgtaaatctttaatataacttttcaaaactgctaaaacaaaatttttaaaataaacataaaatctgccatttaaaatctttataactgaagtctttgtgcataaaaccccaaactgaaaaatcacataagtacattttttgacatctgtgcattaaagaaagcatccctttaattactgatatatgatttttgttgttttgttttagtcactaacttgtgtctgactcttatgaccccatgtactgtagccctccaggctcttctgcccacgggatttccaaggcaagaatactggagtgggttgccatttccttctccagaggatcttcccaacccagggatttactcccatgtaagttatatttattttccagagagtcaaatcctttgaaacccaaatatttaatcaattttccacctggttaaaggaatgtatggaggtaagacaggtctggcactaatatacagtatgtctaataacagggcaaatttacatggctctttagatgggaaaaaagaaactacacagttcctttgctcctatggagcagggtctttacttaaacactacaaatcagttctacttatttctccataaagttataaaccaggtatttttacaaacagcaaagctgcatatactattctcaagtttaaagagtcttaaaatttttcatacttacccctttctacacttctttaccttactatacttacccacaaactcaccaatttttctcctggttccagaaccaagggaaatgctttacaaaatacacacatataaatgcaaacatatactgttaaattatatatgaaaccactttcaagttaactacttatgtttctatgtccattatgaaaatagaatatagtaatatagcaaacagtagtttaaacttcctccctatttaattatatcaccaatccctaattctgttaccatgtgccgctgccagaactaattttctaagtagttaatttctgatgactcactccacaaagtatgccctaatttattcttcatgtaagactaactcccttacaatttccaagggtctatccttcaattaaaccttttactttagaaccaaggctgctgcaccccccgctgtcaggccttttaaccccctcagttccacttactagatgattttttattccttacctccattttgattcactgaactgcaatcaatccttaactcctttgtcttcacttgctcatgaaataggccaggatttgatctttgcaactgccaaatattctacccatgccattactccccattttactagcatagctgccaggtttcaaaattgcttttattgtgcctcacgaagtaaactttgtgtttacccaaagctggctatcaaacattttgatgaattaaacagctccttccagactaactgaacaaataaaaaactggttccaggatataaaatcatttgattagaagaaaaacactatcctatacattgtacgttttatccatacttacttttctccccacaaagttgtaatgactagatctaaacacaagcatgggattaaaactgaaaaggttaacatttataaaatccccaattaaaaattttaattgtgaatataaattagcaaatgaaatctaacgtctaaaaagcatatcttaagttcacaacactgactgcatctactgcattactgtagatgacttaaaacttccaaacttcatccttcttaaactctggcaaatccttccacaaatatacattacagtgcccttgctactttgagtcaaatatacaaaagttgtttgggaagctctctcccttcataaacaagacaatagtcaaagatgagctgctcaaaaaacttcagagcagtactgtggggctgtggattggactcaagcagcctcttaacagttctcggtcaaataacaccatcccttccagcttccttacctctaaaatagagagaaaggtatatataagaaatatatagaatatataaaatagaaagaaaggtatatataagaacccatatgctagtatctagttgggaataagcaaatgcaagattcatttactgtccttcccttgaactgtctctgctggattacttcttaaaatagcattgtaaaaactaaagatatcctttcaagaaacttatgattcaggatcaacaaaacaacttgcagagccagtcagcagctaatagatactgttttcgatctgctaatcaaatcaagcaataaaataatgaaaatggtgttaaacataacttttctgtgttatttttaaaagagctccgagatacaattcatataccataaaactcacctctttatagtgtacatctcagtggtttttgctatattcagagttacaaccatcaacactatgtaattttagaattattttcattatacctcaaagaaatcccatacccactagcggtcatccccattccttctccatcccctcatgaataacctactttctctctatacagatttgcccattttggactatttcatatattaaaacaaaacccccaactttataaaatatgctcttacattagtcaacaatgtttaaggtcttcataaagatttgaacacatctccaactgaaccccaaactcggctgtccttgataaagtgatttatcattcagcaacttgtaaatacagtggaccaggtaatatggtcacatggttatttaaagaatagtttatgctttctgaaaacttaaaagggtattaccataaatttccctattacaggctttctatagggtattctaattctacatcagctaagactaaactctgacaaaagaaggatcaaagtggagtattcacgatagagggcataaagatatacaggggatactgcagaagatttatagacgatagcattagataattactgctctccagagtagtaacacacctagagttgaacaatgggagaaatccacccaggggcaggcaaaaagtgggtgaattgtctgacttacaaaataataaaactgtttgaaaactgttttatcatcaacaaatactagcaattctaaatgatatcagggataaaatattcttttccctaaaatatttggttgaccgagattcttgtttttcaggatagcctgtagtctcctcaggttcattttatatctccaattctgcacttcctaagtgtatatattcaaatgtttaaacagtacatttaacgtatgatagctgtttgcagttcttcattcctgatatatctttttttgtgtggtataaatatttataaacagcagagtgagtcttaaagaaaacacaaagcttgatgatccatgaataaaaatatggagaatgccattacatataattttaaagaggttcatcaattacaaaagagacctacatagaaactgtgggtgaaatattttagtgaaatttttttgactgacagtacatttggaagtcactagttgttgtttagcagagaagtcatatccgactctttgcgaccccatgggctaaagcctgctaggctcctctgtctgtgggatttcccaggcaagatactgcaatgggttaccatttccttcttcaggggatcatcctgacccagggatcgaacacatgtcttctgcactggcagatggatcattaccactaagtcgccaggcaaagtcactagaatcgatgtcaaaaaagacatgggtagtattttgatttccagaatttattgtgaagtgagcttttcttaaatttctgccaaaggtaactttatgtttatgatttcccaactattgtgtatctgctgctacacatacaacctttagtaaatagaattaatgaaaagtgttcttcaaccacttacaggtggagataacactgctaaatctgactataattgtctactgaactcaaatactgtgaaggtcaacactgacaatcatttgacaaatatgcagaagttaagacttaaaagaacctgaatattattattcattactgtgatagcagtatgtaggtaagattttctacatataacagaaagaagtattaatgaaattttaaaacattaatcaattatttctttgttgtaatatttacttgtaagtgacatgaagttcaaatttctttcttggctaatttcatgattatatttgaaaataattttgttgtaaaagaggaatgaagctaaaaaaaaaaaaacagacagacgttctcaggatgtcaaatatgttaggtatgctactgtctacaatctcctccacatgacccacttggatttataccaaaaatcatgaattatccaaacaccaattataacttttaaggggtacatgtatagccctccacttttcaagagccctggtatttcccccaccccatctgaaccttggcttctaattcttaaatccccttcagagtttcactggatttcttgctgaattcactactaacttatacaatgctttctcaatattatcaaagtttctataaatacctctggcctcacaagcacgagtaaagagtcctaatacaataaaatgttaattgataaaccatgcaaatatttaaaaggatgaaggtgactgaagcataataaattataataccgtttcagcaatcaatcttctggttcacaaaaaaaaaaaaaaaaaaaaatcacgaacagtacattgttaattacacaatattaacacagaaatgttgacatgtctcttttagactaagctcacaacggaacttggtaaacctaaccaaatttaactattaccaactctatcaaaacttcaattgttaatagctgcttatcctatacactacctaataacatagtacagcttgtttttagcttattgttaaaaagttgtatggtgttgctctgaaaagattctgcatattatctcaacaaacgttatcacaaacttctaaaggttgatcatttacctaacaatgttttccctatgttatcaaagtatatttgaaatgagttttaaacacatgcagattatctacagaaaaattacctgtcatacaactaaaaaaaaaaaaaaaacctaatcaaaaaatgggcaaaagacttaaatagaagttttttctgaagaagataaacagatggctaactggcatatggaaagatgcttaacatcgctaatgatcagagaaatgcaaataaaaactattacaatgaggtatcacctcacatcattcagaatggccatcatcagagtctacaaataataagtactaaaaaaggttttgagaaaagggaaccctcttgtatactgttggtgggaatgtaaattggtgcagccactatggaaacagtatggaggttccttaaaatacaaaaatagaactaccacatgattcagcaattctattcctgggtatgtatctaggaaaaaaacacccctctaatttgaaaagatacatgcaccccaatgttccacagcagcaccaagtgcccaccaacagatgactggcttaaaaacatgtggtaaatagacacaatggatctttgttgttgttgttcagtcacccagttgtgtctgactctttctgtaatggaacattacatggacataaaaactgaaatattgtcattgacagcaatgtggatgaatctagagagtgctgagtgaaataatagaaaagtatggatatcacatatatgtaatctaaaaaataatacaaaggaatttatatacaaaacagaaacagactcatagaaaacaaacttatggttaacagaaaaggagctggagaggggaagggacaattgatactgcaagatacaaggtatctctgtaataacataataataatggaatagaatttgaaaaaaaaaagcctggaatcactatgctgtacacctgaaactaacacaacattgttaatcaactatatacctgcaatgcaggagaccccagttcgactcctgggtcaagaagtgccactggagaagggataggctaaccactccagtattcttcggctttcctggtagctcagatggtaaagaatccgcccataatgcaggagatgtgggttcgatccctgggtagggaaaatctcctggaggagggcttggcaacacactccagtattcttgcctggagaacccccatggacagaggagcctggtgggctacagtccttgggatcaaaaagagctggacgcgactgagcacataaaaaacaaaaacaaaacactcccacaaaaaccaacggccatcttgtctgcgaattctgttccacaagatttacaagccaacttttccattattccaattattctctgaatcagttccttatcatatgtccacgtatttttttcttctgaaacaaaattctaaacaaaatgataagactagggagtgggatgttttcaacaagaacatcagtgataaattctgctacagaaagctctgaagagccagctttattccataataaagccagacttctactattgtcagagataagcaaatctctgcaagtcaagaggcacaaaattacaaccatcttttaatattccaacccctgttataaatagcataacacagtcagatgagtcatgagaaacctcaaaatttacttctgttgccctggtctgatacgtctcttccatacagttaagaaccttgtttcaaatctttgtccacttctttagacagacctctcagagaacaagggaatgatcaaaatcaaccagattaacattaccggttaaaaaaaaaaaagttaacaaggtactgtcatcatatgatctaaagtctagaagataatcataccagtaatcaagaggtaaaatacagaacagtttatatagaacaatatccactgggactaggaagggtggcaagctccctaatgagatgtggaactcaattcttcttcagagtaacatggttcaagactgacaacctaagtggttgagggcagtaatgtcaactcatacgttgaaagtactcataaagtttaatttgtctgattttaaagataaacaaaaggcacttccttagtggtccagtggctaagattctgtgctctcactgcagggggcccagtttcaatcccttgtcagggaaccagatctcacataatgcaactaagaattcacaagctgaaactaaaagatcccatttgtcagtaaaaccaggagcagccccccaaaataaataaaaatataaaagtactcctgtttccttcctgcactttaaagtatcattatatgcataccatctctatgttgtagttcttaaaaagtaactctagaaaggaggggggtgggcaggggtgtctgacttcctttcagtggtctgaggtaaaaactgttttcatattaatgctaagacattccttatccttaatctcacaagtatacagtggagttttccaaaggctacctgacttgtgtaacagctggaaagtgaatgaagtatatacaagaattcaagttttattaagcctaagtttaaatgagatctgcaaacagataaaaccatgtcattcttctcactaggtttttttttgtcttggaaatattatttttcattagaaatgttatttatgataacatgtaacaagtttattatttttaataaatctgtttattggtttgaatttctcatacagtaaatatcaagatataacccatagatacagaaagtctctgtggtccttaacttctagagcttgaaggagtcaaaatccaaagtttgagaacagctgtccgagagaaactcttacacagagacatgtctgagaaagttcattgattgcagtgtctgtcagtaacaaatgagcaacaaacgttcatcaactggggaaccagataaaattcggtttattcaagtaatagaatattacacaatgatcagaacgaactatacagttcttaatatacagcattagtaatttttacacacaaaacatcggggaatatgtatcaaaacagattttatacacacacacacacacacacacacacacacacacacacacacagtttagggaccacagagattgatactaaattcattacctgattgcttctgactgggggatcagtgggggggtagaggggtgggaaagggaggaacagaagacatcataatatcttatttttaaattaaaaacacctaatagcaactgtcaatgtttgttatatcctctgcactttttctgtactttaattaaagatcttacaatcacagacgctgcaaaaaaaaaagtgaggatgagggaagagttattctttttgatttagagaagactgattaaaggctaaaaatgcaatcaatggatttcaaaattccaatctataatctttatccatgtaacaaaccttcacaataagaagtgtatacatatagaacacaattaagtgatcactgatttttaaactcatctttccattctttacaacacttaatagtgtcttgccatgaaagttctcaaaaggtctttaaccttatctttagcttcctctttttctgtatcacagatacatactattacctatgcttcccatccgtccccttccttttatccacaattttgttctaagataaccaatccctctagccacttgaattatgcttttttgcacatcctctccctcaacatgctctagcatctacgcccatctaataaagaccagggcttgaacaccacttacttaggttaagaccttatatatacaccatcaattgctctttattcccttcatccttgaagagacttttccccacaacaccttacaaccaaacttctaaaacataaatcccaaaacacccagctactttatatttgctacctcttacccatatctctcccatcaccattcaatcttaaactgcagatcccatatgctcaaaaaattttgtggccttttgtattacttaacctatgaccattcccttggtattatataaaatattattttcaggcagtaattacgatgggaccatctgtatttaaacctcagctctgccatgaagtagcagtatgcccctgggtgaattactatttgatttctttgaaatcgaaaatcagcattctcatctataaatggatgtctacgcaaggttgaaggagtataaacttcaatatgtacatacaaagcacctcatatgctatagatgcttattattaattcattttgtctccccctctcaattttctctagggcaatctgagagtgactctttgatgtcttcctccatctctttgttgcctccaagtttgagtccaatatgatcaactgctggccaaaagtttccacatgactgtttcaaacataaactattcaaaatcaaacatatttccccctccactaaatatacttttgaagactgcttgatgtgtcacccctctcccagagcttagatgtccaggggaaaaggtgcttataaatctaccagatgtcaaatccagattcttcaggtccacatctttctcctcctctctattccctttatagatatgccaagttcagattctactttcttctcccacctcagtcccaaacctgccatgtttccccaaacctctgccttctacaatacacactataaatcaagcagtattttgactgtattactcccctacctaaaaccttcaatttatccatagactgggaaaaaaagaaaaaggaattcaaaaacattagacagacctgaaacttgtcagtccccaaactacctcaaccatgctttcagtagcctcaggagtcaaactactgttccttatttcacaccaatgttgcctttgaattacttttcctacaccttcggaaattctgagactgacactctcttctcccaagtctaatgccccatggccatcccacagtactttaaaaggaccccaaaggaaattgttccagcatacattaaagttacttgtctaagttttgtgtcctctattagtttaggctcctagcgggcagatccttagtagcagtgccatcctaattaggacacagctttatagctaggcaggccctcaaatatttgtaaaatgaagatttgggagatttaaggttacaaggaactaatcactaacattttatgaatggggagaattaactgagaagtactacatcaagcagggacacggagatggattttgaagtcagactaacttctccagaagaaagtttttggggaagaaagtttggcagaaaagagctggaattggtaacatacacctaatataatgcagttaataaagactaggaacagaaataaaaattatttaaagaggaaaatgatcgatgataggaaaattcttactttgtacattttaaaagattaaaatgccatttcctttttcaagaagacactatcattcctaatcttggttttcaaagtaaaaactactgatcacattttcccagaattaacgtgatactttatttaataacgtgcttaatgtccataatgcctcaatcataattaaataattctggtcttaagaatatgctaaaacccctcctctttgttcattgaaaacatccagaaagttttcatcttgagaaagaaatgtacctatctttcaaaacattgtgtcatttgtatgttatgtacctatcttttaaaacattgtgtcatttgtataagttctcattcattcaacaagttttttccaagcatgtgctatgaggaagcaaaggacagaaattctccacccccatgaagccaacattccagtatattttgccttcaggaaacaaagtcaacttccaatcctgaaatctttggagcattatcacaaactccctagccatcaaaaaaaaaaatcaggaaatactatttcatcattttgaaaataggcaatacagaactttaaaagacactgtccaactttctgtatccatcagttaaagacaaatcatttctaggataactgacaaggcaacgaacggtcctaactgcagtgttactggaggcgctacaaagtgaaagttactgcaccctaattgttacaagtgaaactaccaaatcacgttgtgcagggtgcacgaagttattaacgtggtcccaaggcatctagcactgctacatctgtttttttcagtgtgggttgatcggtggtatttggaaaaggaagataatccaactcaacatagccaattgtttccattttgtaggtacgtttgatatcaatggtcaagaccccttcccctgaaacggattctgaaaaacagaatctgtggactcgacgcttcaaaaacagcacctggaaggttttgagataaaaccagagagctttagggcggcaggcagctttgttcccggttttgggaggtttttcacatgtaaatgttcccaaagaagggagccaaggattaaccaaccgcgaggagggtgcgagggtgggaagactggaggccaaagccggctttctagcggtctaaggcggagcaaatgctgtcctctcccattcaactttttaggtgtcacgttggggccacggagcccgtaacagggttgagttcacgactcgggaggatgaagagccccgtctattaactccatttcccaagtgcaggaatcccgaagggaggggggatgaacaccctcaccaactccgccccgacccgagatcagagtccagcagccggcgcgccgcgcggcccgagcaacaggagaagcccaggccaccgctctgccgaccccgcgacccgcagatgctcccggctcccccacccccccacccaggcccgcccgcgtttctttcttagccccttgcgggctcccggcaccgcgaagccaataacgggagcagagggcgagagcgcccagacctgaaaagggtgggggggtggggtggggggcgaagttaaaggcaccggccgccgccgccgggctggacgaggccggaagggggcgagagggggcagcctgaggtcgccgcccgggggtgggcggtgggggaggggtgtggggtcggcgcccgggccgccgcgacctccccgggccacacaggcccgctccgcgcaggcccgccgccccggaaccggggcaggaagcgtccccaccccgacctaagctttaaacctcaggcggcgggagaaacgacggcccggctccccctggaaggcccccgagccccccttgtcccgatcacccctcacctcttggttgaaggcgttgacggcgtccatgttcgcgctgcggcggcggcggcggctgctccgggcccgccggtcacataagacctcgcgccgcggcggagagaagctggggaaccggccgggccttgaggggccggcggacgcaacgagcggcggagccggaggccgggcaggaagaggctgcggccgaggcggcggggcaggcggctgaggctgaggaggctgaggggtggcgggccccctctcagtcccgttcggaggatgaggaaaaagaggcggcggcggcggcgctgggctccaacatgtccgttcggtggcggcggctgcgctctgcgtctcgctgacacggccccccgcgccctcacgcactggcccacactggcccgaccggcaagcgggcgggcctctcctctgcctctcgccagcgggatggcggcagcgacccgagtccacgccgcgcggggcacactgggacggctccggcctcccagcgcttcctgtgcccggctcccgccccgccccgccccgcc

SEQ ID NO: 140 - DNA, 71784 bp, Hippotragus equinus
  source 1..71784: mol_type = genomic DNA
gttcaggaccaaagtgaagccaaagacacaaaaaataaaactttaaactgtgagtagcctaaaaaaaaaaagactacatacacataaataggattacacactttaatctgatcaacatggaggaagttgggaggacaaaagaaactgagtttcggctctgtgttctgtataaccaaaggctccttgtccaaagagcaaactgaggtttcaaaaaccagattttatcagaatattttgggaacgcatactatgtgtaatccaagaaatacattatttgcaggaaataggaaaatcatcaagggcaataaaagattaaaacaaaagaaagcaccagggttttgagcaggtttagtaacatgaatacatctgcagaaacaacataaatggttttgactggctgctatggaaacatgctaatgaggattggtccatatcttatcatcgtttaaaacatgtttctttggaaaaatggcgatattggctgaaagtaaagccgtcctttagacacccagcttgttggcctgggtgagaacaactttgagaactggcataaaagcggaggtctcactgaagttgctagtactaactatgtgggtgtgaatagtcaagccttctgagtagtttcgggtctcgatgctccgggcgatgttgtgtaaaccgttgatgattgttggtgaaagctgaaatcaaggtggaatagagagagaattaaaggagaatcttccatgagacccgctataaaggtgaaaccctggcatttactaggagtttgaaatacacattattttttaaaaaatgaataaactggtgaacatttctagaaagtttctcagaccaaacaacacacaagttataaaatggaaccacgacacaatgatttatgtaaggaattatttacgaactacacacgtatgatcagccaggtattttcttaaagaaaagcagccagatctcctcccttcaattggaaagttaattgccgggagccttaattgccgggagccaccacgggagatcccacccatgacaaggtcatgaggaagagaactgttaagcaaggcttcagaactcaacgggctccctaggttttctcgagcatctaccccaaaaccagaatctgtctgttttactatttcatgactttcaccaactcctctgacattaacaggggtctattcctgatgacccttctctggagaaaatcaacttagggctatagctaataagtctcctggacatgagagaaatatttcaaatcaagcccctctgttagcattatagcttgcttagcaggtatatccagactcttgcagctacgcatatgattatttacatcctcccaattgtgagaggcacaaaaagcctaaaacatagagcctttccaagagttaaaagttattagagtagtgttaatgtaggattccattattgggccaatgcttgttgctaagttcccatatctcttatccactgtgcacctgggaatgcattagttaacatagttggaaagtaagaaaaacaagtgtagccttgaaattaaccacatcagacttttgagctaattggttctttcttgtaactcactgcacctttgcttcctgagaatgtaactctgtttaatacttttcgaggctgacacagattagaaatataagaaaaaacatttcaagggaaaataagttttctggttgagaagcctttatcaaaagagggtcataaaatgttcacaggcctccaaggacagaagataatgtacacaatattgtttatgggaaaggtttgcagaaaaatcctggtttctataaagacaaaacagatacaatgtttgggctgactctgtatgactttgcatctttcatttccctctatgtacaagtaaaggtataaaagacccttttaaaaataaaaacaatgggcctcgcttgaagaagcttggtcaccccgtgttttttcttttttctctttttttctctcttactttctttttcaggctgatcccttggagcatagaggctccctgcgttcacttatctgcccggggtctccaagacctgaacgggaagacgttctgcgtcttcactctcttgggagaccgggaaggcacctgtggcctccgtgaacagggcaaacttcttgaagttttattggctttctatgtaaaccaaggaatatcagcctctttctctcctctattttcttatctacaatattctttccttatctctctaaatcatccgccgacgccgtttttccctcaggttctcctggatcctgcggaggctggaccccggcagttaatgtctttctccacttaacagctttaaatcttcattactttagatatagcctcacacctctgaaagtgtttcctttgtacatgaagaagttagagagtcttaatcatgacatcctaaagtaggggcccaatttactataagatcttgttgacaacagaaactctgtactcctggtccactttcatcaggagggcaacactcctcattatggactcaatttgctcattcttaactgctttttagtcctgtcatctcttaaaatcataagacctagagttgtttttcctctctctatcattacttggcttccatacttttaagagactttttttttggatcagtccatgggctacactccctttccactgctatagtaattttctctggttggggtctcacgctaaatggttatttttatctgatgggactgatatggagaatggggaagaggaatgctaaaatgcaaaagtatgaaaaactccaattttttttttttctccccaagtgttttcattaaaaaaacaaaacaattctggagaggcatggagaggtggcaggacagagaacagaagacagtgtctgctcccactgctgactgtcttcgcaggcacacacactgacccgctccacctgtggctgcatttggcgttgcctctgggtaacagctattgtcaaagaaaagggtcagagtcttaaggctacaagaaagatgacagatttggtctctggaaaaacagagtatctgcccactctttgatttcttaattcaaggcacatataaatatgaacagaaggccagtcaccttagagccagtgtgggccagtttatattctgttataaaaaggcgaaaacttctctctcacacacacacatacagccctatgcccttatccccagtgactgaaacgtaagatttagacagagcaaagctcagtctgtaaccgtcacggtcattttgcccccaaacacactccatactacgtactacacactacatacgataccctacacgctacatacgacaccctatctatgacatgcaagtgctcatcagatacatatgactagcaaccaggagtaaatgcttatcataaacccttctttccccacgaacttaccgtctgttccctaagtttatcatacagaaactccaaacgtttgctggcatcatctagcttcctcttggtttgctgcaggagagaaaaaaccagagatgctatatttgaacagtaacttttatcccaagaacttaccccatctcatttcactaaaccttataatcatggtgttgaacagctttgttttataaagaaatggcaataccttacaccagggaacttgaacagatgattagaacagagaacagttatctattgaggcagggagagccagaggtgtgcacaaagggaccctggctggatctcaggggctctgcgacacacttgaggtgtgtgtgtccaaccacactacgtccacaagcaacagtgagagccacctggaggcagcaatgggtcatgcactacagaaaaggaggccgaacagttactgtacattaaataaggcgaatattacgggagctagaaagcaaacatatgggtgagctgtgggatctttttttaacctcaagaacacactcaatcacattgggtacatttaatcctatcttattctgggcctttaaaacaccaaaaaaagaaaaaggagaaaattatcttctgacgccttaagattattaagagggaagtgttaaaaaagagttcttaaatgagtcctcctatccttctccagtactctaagtatagtgagggaaaactagtctaaaagtttaaaatcatactgtgattaacttaatgatctgcattatacctagaagtgatactctttttcaatatttattgaatgcctactgtgtgccatgctggggatggttttgtgtctcatggagctcatattctattgggtgggggaaaaggtaactaaacaatatgctgcatgtcagctggcgacgagcagcatgaagaaagttcgcggggtaagggcgtgggcggcgccagcagtgcgaggtgctgggaaggtccgaacggctcacgggacacctgagctggcgctgggaactagtgcgcaggagccctgccattctttggggaagagccccgggcagaagcggcaggtacaaaacctctgatgctgacggcctcttgctgtgtttgaggaaggcacgtccgtgtgtcagaagaggagcgaggaaaagctgaagccatcgaggatagccttacaaaccaagccgggctgtaacatgctgtaacgttactttgtgtcgcctggactgaactgaagtgaaaataagaacaaagccttaccataaacaggatttcgagtactggattaaaatggacttttgtggattaaaatggacttttgtggacggttcaaagttctgggcagtgtcagaacttcttccccaaatactgatgggaacagcctgtcttctgcctggtcctgggtcaccagaaaggaggtgacagatactgtgacctggaggaggtgaagctcagcaaaagtgtgctaagccaggttgtgccctgccagcttctatttacactgactcacacctgaaggaagactggagttttcccattaggactgctccactctgcatgatggtgacctctctgtttcaaggtgtgcccaggagacagtatacacctccctgtttatcagcttcacctactctctgttcctcgcctggtccttccataacttccagaatgccaggggctaaggtttatgttaactttcccctgtctttgccctcctgatactactgtctgtacagggaactgcttttcaaaagactagcagagggcggcacatattaatactcaacgtctgatgaaacagcaaatcccagaggctgtgttttcaagcagacaattggccgtgactaaacaaacacatttgatgcttgttggcagaaactgaaatttcatctcgaacaacactggctttgtggaatttttgttgttgccaatacacagacatcctctaataaactaagtcacatcagtcactttgactatgaatatgattccaatatctaaaacactgaactgttaaggactttgcaaagttaaagattgtctatttttaaaagcttttttaaaaaaaaagatgttttgatgtggaccatattaaaagtctttattaaacttgttataatactgcttctgtttcacgttctggtttatttggccatgaggcatgtgcgatcttagctcccggaccagggactgaacctgcatccctcgcactggaaggcaaagtctgaaccactggactgccagggaagtccctacttctaaaacctttagacatacactttgaaggaaaccccaagtctgagtttcttgtattttagcattctgccctattcttgtgccagacatgatgtctgccgaggagtcagtgcagctcaggggttgagaacatgaattctggagccagactaggtctgaatgctggctctgcctggattatattgtaactattttgtgccttaacttcctcatctgtaaataaatatggcaaacctacctccatgaggtgggtttaaggattatataaaaacaactgagtatgcttttatatgtaaagcaaatcatacataaatgctagctttactgcttttgtaaaaactttcaaaatacatcttgtaagactttaagcaataaatataaaagagctccataatggaatcttttaattaagcaaaataaaaaacacatacaggatctgtggctgaagagaggcagcgctgaataagatcctcgaacgtggtctttagaatgaggtgttcatctggaataggcttcttggtaattttttctgttggcaaagactgcacatgctggaagaaataataccattaaaatgagcagaaatgaccagaaactacctgtatacaaagtcctgaatctgtcataaagagaaaacaactaatttatagataggccattcaaaatcaaacaaaaaatgaacgcgtggaatcacctcggataagcaaacagaaaaatcagatattcaatagaagatacaggtagtcttcctacagcttctactttcaaaagcagggtcgggtataaagtatttgtttaatcatggaagatatgttgatcaggactatatataactgatgggcaagaggaccttgccagaaagaaacaaagaaccaggcgtttataaagctcgctggtgggggcgactgcttgctttgcttgttggctccttgtttattccaacagtcttgcattctttgcttgttggctccttcttgtttattccaacagtcttggaggttcattaactggtcttttatcaaactgtgagattaaatcaaaggttaggatagaagagaccatgacctaactgaatgcataagatggataaacaaagaaggaatgtgtaagtgtttaaagttttgattgattatattcattcatagaaaatatgaggcaattctgtactaggcactaatgaatcaatacagaaataatcttctctctcagggagtttacaggctgctgctgctgccaagtcacttcagtcgtgtccgactgtgtgaccccatagacggcagcccaccaggctcccctgtccctgggattctccaggcaagaacactggagtgggttgccatttccttctccaatgcatgaaagtgaaaagtgaaagggaaatcgctcagtcgtgtccgactcttcgcgaccccatggactgcagcccaccaggctcctccatccatgggattttccaggcaagagtactggagtagggtgccatcgccttctccaagtttacaggctagcaggagggaaagtttaaaaatgtcataaatgtatgtaaaatagcaactgtggttaagttcacatcactggaaccaacagacaatataactgggatttaactgaggggaaggctctttaaggaagttttatcagaaggttaagtaggagttaaacaggggaaaaagtgaattccagacagaagaacagtacacaggaaagatcatgatatagggactgaaaggaggtcagcttggcgggagcagagagacaagaaagaggagtagagcggagagcttccagataatacgaaaaatgttggtccttatcctgagaacagtgggatgtggtaacatgttaagcaacgatgagctaagaccagagaagagatgggtcatagcagatgctggcacaccagtgagaggctcctgcactgctgaagactggagacaaaggtagcacggactagactggaaacatggagaaggggtgggagagagactttacagcagtatcagcaagatgtggggataggtctgaaaacaggttaaaagaaaaagagtataaagatgcccaggtttctggctggattaaatggaaaggattatggtagcattaattgaaacgagacacaccaaaagacaactaggtttgggaggaagactatgagttggactttggatatactaagtgtgagatgcctcagaaacatccaagtggacagggagctgggtatcatggcctggctgaaccacacacatccatggcgctctccctctccatggtaactgaagttctggtccaaatgagtgtagcacgaactcccaggtcccaatacaaatgaatggcttcacaaatggcacagacttgtaatcatggaaactaacaatgcatataagtgtatcttcttgtgaaaagaagcaggtcctcccacctccatcagaacactggagtttataatgttactgttaatatctaggaactctcttaacagcaaaacaaactcttgtgatagacacaatctttataaatttgacttcaatgactcaaagacaaggacagaagaactagttttatatacttgggcaggaatttatttcatcttcttatgttgaactgtgacccaacctctttatttttcatgaatagatcaagattaccttttatgcctaagtcagttacatggaaacctgataagattttttcattactgagagccctgccaactagctgcttgttgtgaaaagcaagtatgaactgatatctctatccaaagatatggctatattattagctcttacacacacacaagaaaagatcgaagtcattatatttttatcttacatttataaaaccctttggaaacagcttctgctgagcagccttggatgccaacatggattcaactgatcttaaattgtggctactgatcagatgaaacaaaatacttcaattgccaagctactattaacatatactagtaaatacataaggcctttctagaacgtttgcatatggcgacatcactggaaaatactgtacacgtgtgatcttaaaaaaaaagttcttttttacttaagttgtctaaatgaaaatcaaactgagataataataaaggtataaccacaaaagttaacacgttgaaaaaaacacactgaaatagagccatcccccacttccacagattcactgttacctgcatggtatttccaatgggagccccaggggcaccttcaatattgggctttgaaaacgacggaggcatgcctggttgactgaggggctgctggatgccacggaagggctggccaccggcgaggtgcggctgtgggaatggagcttggctgggcagcggtactggtgctgaaggctgctgaggcagcatctgtgactgggggtcacccaaggggttcatgattggcgatgtgatgggaacaggaggcgtaaagttctcaggcatcttttaaaagatggacaaaaggtaccaggagtaaggaaaaaatgatataacaacatttcctcagctttaaatacaggagttagccatctgcagcaagatgagtgtaactagagattatcatactgagtgaagtcagtcagaaagagaaagacaaatgccacatgatatcacttacacacagactctaaaatatgacacagatgaacttatttacgaaacagaaacagaatcatggacatacagaacagactggtggttaccaaggggcagggggctgagcaagggatggaatggcaagctggggtgagcagatgtcaacttttatatatagaatggacaaataacaggggcctactgtacagcacagagaaatatattctatatcttatgataaaccataatggaaaagaacatatgtaagtgtaactgaattaactttgctatacagcagtaactaacacaacactgtaaatcaactatacttcaattttaaaaaataaataagggagttagatcattctgtggttaaaaaatttttagtaacagtagaatacttttgaaaatggatttttatgcagaatcctagagtaaaacgtaaaagtaaagctaatctgtctaagagggttggagactcaaacctggatctctgtctcccctttgccttccacactcatcccataatgggcctgaaccaaggcattgttgaaagaggatggagaattatatttagctatactgggataagaaatgccaaaaatgtgtatgtgtgtgggtgtgtgggtatcaagtaatcagatataatacctttttctgagaccattaagtgatacctacttagtgatcaatcacacccagagcagtagaccaagtttctgattatcactgacataattttggggattctgttcacttagtatctcccaattttatgttctggcttctcattcctgtatttgggggacagaaatcactaggagtaaagaaaaaaaaaggagaaaatggcttggggtaaaagaaggaaagaagaatcttatgctatgctcatgagctcagctaacaaggctatttcttttcatatcatatgtgatagacaaaaatagtccaaaatataattacgaattcatgattactgctgggacccaaaaccaaagtaactcctaaaaaagaaattcatttgagtaacctgaaattttgtttcctactctttgaaacagacgttgggaatttacatcttgtcttctaaaaggggtttaattcataccactgtactgttctgtattttccttcccttcatggattagaagatttaagttaaaatacacgttattaagtagagcagtcagtaagctttgcttttaaagaacagtgaagtgtggtgtgcttcaggtggctacatgattgagaggacatctgggggcaactgaatagacatctttttctagtaccttcttcttcttgggtcctctgttcaaagctggtggatcattccaaccattctgaggacctgtaacagataatagagagcattttcctctagaatcctggaaagagaaactaaattgtatccatcatataatatctttaaattctaccttcaccctgagataactgtcacaaaagttttaccagctgagctgctgggatcactatgtagccctggattcacaaactcattatcaaaccctctggtaatcacagggccctggcttagaaagcaggatatcttgatattatttcttttaaagtgaaatagctgtgctaaatttaagggtagtcaagcttttatgtctatattggtacatgactttcaaagatcaaacaattctctctcaacaaagaaaaaataaatcacctgaatctgctaaaaaaaagtgggggggggttcctgatgtattcaacacacacaaaaaagaataaaagtagcaatctcctatttcctaagaaagcacttaaacataagcaattcaacaaacgtaaatcacccgcatggtagaaacactgttaaaaaataaaaaacagcccaactacacaacaccagtatgttttactacctttgagttaagaattatcttaactcaaagtagaaaagtgcattcaaatatctgtagtaagatattttttttcccctgccacatacacaaaaaaattccaggctggcagcaaatttaaaattaaactactgtcatctttgataaattttctccccccaccccaaatctcccaaaacctctcatctcaaaatgaaacaagaacatcagtagcggaactcattaaggtattgaatacttaactgcctttatctttaaagaaaaaaggaacaagacatgccagaagcaggataattactaaatcacaatataatcattttacgttttattaagttttgtgtatgtgtatatgtaaaagcaaaaaactcttctttaaacaaattaaaattctttcagcattttatttttgctcaattgatatccacaatattaaatcacaacaaacttgcttcgcaaaccaaagaacataatgtcatagaaatttcttttaaaaaacaagatcttctcctagccagcatgaactcatttgccttgattttaaaaagagaattacttttctataagtcgactaggagacagaatgccaaatgagcctcaaaacactcaggaggcagtcacaaaatattaaaccacatgttgcaaattcttaaattctgaaacttctggttatacacaaactagtcattcaagcctttcccatcacattctaatctttcttatatctaagacaatattggtatagccttgtctttatgtctacatccaatatataacttttttgattcaagatcatttgtgtcactatgttaatttcatcagttctaagatttgattcaattaagaagccaaatttaaaaaatgatactggtcagatttaggatatcattgctttgaagttacatgcataattgttaatgtccattcattaattatattcaatgattcgaagatttccaaatatacattctgtaactaattcaccttccaatatagatgcctggtcttgcattgactgattttctgtagacaaaatgtaaaagtcacttaaacagtattatcatcaaagactttctaaactctactcattttctaattgtttctgctccctctgttgacctcaggaaagaacaaactacttttataaggaaaaaaaacttacttttaaatcaaatcacatgaaatggtttctatctaagaaagtcatcagtttgtaggcaaagctcattcatttaaatgtgtcaattagctctcagacacttttattctattatgccagctgtttctttaaagagaaatttttgttcctttctgtttaagataacattatttccccaactgtttgcatggattgtttttctactatttgatcaatgaaactcagtaataccatggtgcagggagggaggagagcactgcctaacatgttgtaactgtgtcccttttagcattatttaaagcttgaatccaaatcagctgaggaccttgtaaaaatggagattctaattcagtaggtacagcatagggtctgagagtctactgtctcggctagctccaagaaatgccaatgctgcgggtccaagccctttttaagtagcagggttttacaaagaaacggggggggggggggaggggtttctgccctgttgtgcagacttcagcactacactgctgaacataatcagcacgttagacaaccttaacgagggggtactactttgctgctggatctgggaggccccaaaggcctgcattctggaggaactgtaatttctggggtcacaccatgaatgtgaacataaatgggatcaggcccagagagcgtgtaaccatctcatattgtcttttctgtaagaattcacagatgtgcagactgtttagcacaagtcttccttaaaagaactgaaagttctggcagtggacaagaggaaagaaggctggaaactaacacagcaactctgtcagcaaaactgtcagatattcagggtggggccaggccccagcctccagcaaaagcgtgtggtgaaggtacataacaggcacagacgactcacaggcattcaactgtcttcactcggagaagcgaccctggtgcactgctagtgcaagcgtagaggcgcgccgccactgtggaaacagtgcggtgggtcctcaaaaattaaacactgaattactacttgagccagcaatcccacttttgggcgcataccccaaagaactgcaaccaggagctgggcaaatatttgcatactcctgttcacagcagcattattcagatagccaaaacccccctgtgcagtttataggggacaaaaaaaatgtggtatatacgtaagggtggatgcaaagcaaagaaccaccacattccgtaaacatttcagcagcagctctaaaagctctgaagatgcaaattgtttggtgatttggattattattcagctttaagaaggaaattctgatacatgttacaaacatggatgaatcttaaagacagtgaaacagccagttacaagaggacaaaattgtcttctaaaatgtcctctaaaaatgactacttacatgagctacatggaatatatatagacagaaagtagaacactggtgaccaggggctgggaaaatgaggagttttaaaggctgcataatttcaatgtgggatgatgaaaaacttctgcagttagtagcgatgattgtacaacaatggaactgcactgaatgtcacttaaaaatgatgaaaatggtaaatttatagtctattctacattaaaacctttaatacatgcacacatacacataacatatgcatatatgtgtatgaagtgaacaaatgcacctaaattatcagtggtcatataagggtggcagaattataatttgatttttatgttatttgagttctttcaaaatcctacagtaaaaaattaataaaaaattaacttaaaaactgagtgtggcatttcactggatactgcagacccctatccaccttagtgtagggatctgtcctccacacagtctttggggaacagagaaccactcagtctcacagagagaagtggaggtgctaccatccatacctgaatcctgcttcccactgggaaccttatcaggtacaactagaagaacataatggcagcatctatgcactggttaaggtatttttcagtgaaaaaatactagtgccaatggcatggagacttctggctagaacataatttgagacagagagaaaagagcatcctcataaccatatacctcccccttcccctgtaagctgagcatgtcgcgtttttaaaagagtaacaaaattcagaattaaaattgacaaagaatgtatccttgtgttcattttctaatgacataaggtaaaacagaattagccggagaaagtaaggaaggctatcatgctcctttctgttgttgaaaaggttaaaaaccaggtacctaaaatttcttgccttgaaatgtaatgattttcaaaatttggccccaatacaaattttatgttccaacttacaacaaagctatgtgcaattcactagaaatacacgtacttttctgccttcctacctctgcctggagtaattctgatcatagactgaatgggcattcaaaaagaatttagtgaatgagtgttgtgatgatttcaacatgagtttctctgagtagcaggcgcgtcactttgtggttcactaacagaggctagtgaactatcaagaacaatttaccagcggaatttccaagtcctatagaaaaccatgatataataatctaagatatactggaacgaaggtaaaacttttagtgacaattatctgtataacctaagcaaagttttcaggaaatcaaaaaataaggtaaagctctgttaattaaaatatacagactattaacatgcaagagataacacagcagccagcttagtacatactgagtattgcttcttcctattagttactctgtttctcagccaggttagaacagttactttgcacataagcaagtactttattatatggctgaacacacttcagctcaaggagggaaagaatacccatgcaaatagttaatttagatgatgaggtaacaaatacttaggagagccatgctaaatgttcctgcagttccaacactgatagctatttcagtctcttccagtgtgtgcccagttgctcagtcttatctgcctctttgagacttgacggactgtaccctgccctctctttcagaatttgccagtcgtgtctgactctttgcgaccctatggactcacagagtccaggttcctctgtccatggggttctccaggtaagagtactggagcgggttgccatttcctactccaggggatcttcctgacccagggattgaacctgcatctcttgcactgacaggtgggttctttatcactgtgccaaccagactatctggtaaagaatgaacacaggctctggagacggagagacctgggtttgcacctcaacttgaagatcatgaccgtgccatcatgagaacattatgaaccctaggaaactcaagcttcctcatgtcaatttttaaaaaattaatgattcctatttcttatggctatgagaactaaataagaaaaaagatggcaagatggcaagcactggtacatgtccaatgtatgttcaataaatgacagtttgattccccacttctctgcactacttccttacttgaggatttacttaaatctatctttcactcaatctattattactcaaccattcagaatggatactgttttcactcatcccggtttaatattttttttgaactttacaactgaactaacactcctctctaaatatcaatctgaatgttctgtattgaaaattatatatattttatttgtgcagtaaagggtgatatatattgtatgattttttggtagtttgaatatataccaaaaaaggagagaaagagataatgtgtataattctggatccataagacatcaagaaaaaaagtacttccttaataaatcttattatatgataagtgttttcagttattaaagctactgcttagcagataaagagagagaaaatttatactggaattccaggagcaactctggtatccgacagcaagactcactcctgttttgtccctctagttcaaagccgtcaactataatcagcaaaggaaactaatttcagttaccaaaaggcacagagctctaactgtgagtgtggttttgcgtaatcacagctaactcactctgtggtcactgtccataaacgttttcaatgtattaacgcactcaaccctttgcataataagcttaggagtatgtaccactcttattatgaggaaactgaggtttaacattaagtaacttattcaagatcacgtaactattaggaaagagtgaagctgggatacaaacacaggaagtctgactccaaagcctgcattctttagtatgttagtggttcttaatcccaattaactgatctcttttttttataatacatactttataggccccttttacaattctaatatgaagatcagataatgttacctacttctgaaagatgaatataatgttttaattgcaatgtgagagataaaaaagaatttgggtatttcactataaaaataatttaaattatgattttaattagaaaatttcaggcagaacttgactgctaacaacaattaaactgcctagaaatttctaaaatgcttgagagggtagaactgtcctaatggagaatccctgtactgatgtatactgtctttctgctgtcttatgctcagtcatgtctgactctttgcaatcccatggactgtagcctaccaggctcctccgtccatggaactgtccaggcaagagtactggagtgggttgccatttccctctccaggggatcttcctgacccagggatcaaacccgggtctcccgcattgcaggcagatgctttaccacctgagccaccagggaagcccctaaaaataattcaaaattatggtttcaattagaaaatttcaggcagaacttgaccgctaacaacaagtaaactgcctagaaatttctaaaatgtttgagagggtagaactgtcctaatggagaatccctgtactgatgtatactgactttctgctgtcttagagattctctgtcaagagttgcattcttttgcttttttcttttcagtacacatgttgaaatccttcctcacctttacaaacaaaattacacaatgtgtatacctgcattatttagtctctatgaacgaatttaaggcacaaataattttaaaaactgaaagttcaggaagaacacaagagcacaggtctactctggtaaagaaattagtgtcagttaaatttagctccaaccagcacgtctcttgccaactaatttcttaccgcttattttaaatttaacggcagactatatactctttactcttttaaggcactcaagctttccctgcttagcaactaaagtttattattggaaaatcacattttgagaagtagttatagactctgttgtaaaattcaatcaacacctcacgttagccagtttacagttagaaataaataatccccctccatccacccatgtgatcatgaaataacaaagtggggggggggggcgccaaaccaaacccctttcaagcgcagacctgttctttgggatgcaggcagctcactggcagcaggcagtgtacctgttgttccaggaggcagtgcataagctgaagatgctggtggagctcctggcccgccatgctggaaggaagctccagaggaagggggaggagggaaagaggcggcagggctggaggtaggtggagaggcctggtgctgtgctgggtacagctgggactgcccagagtaggaagaagcagaaggaatgtaaggggtgttagggtaagcgtttgaggtggaaggagcaagaggctgctgaggtcgatacattgctgacccccctgttccgaaggaatactgctgggcgggttgataagctacaccaaggagaagaaacagaaattttaattagtgacaaatttaatcagacagcaatggaaaatccaagtgaactcactctgtggaaattttcaattcttctagtaacagtacgttacaaccaaacattacccacttaaaataatgtcatgcttttgatagtccagctgctctaactatatcaaaagtcactggacccaatatttgaaccttgctgtttccagattgctgctggctatgataatcaaaggactgaccctttttctgggacttctattcctgtgaaaagactgcagtgacatgtactagccaccagatggagccatgcaggaacgatacatcctaagcacactcctgtttactgtgaaagttaaggaaccttggtggccactcaagatcactcccaccataactgcagggtgagcgtgactgctgtgaaccagataccttcgccaacatctagtaaaatcataagctactcacactccgggcttgagcacagttccagattaacaggcaacgctctatgatccctgacaactatatttcttacagtatacaaagttggttagtaaggaatcaggcagtcaactaatgttttaatacaaagactggaactcaagataccattacccgtttgagggaccaggcccagaatgtgaacctccacagagggaatctaatagaactctgctcagcctactctgaagacagcactttcacactgagcactgactgaaaagctgtatcaaatctgtattcatgttaagtaggaacatacatcttattagcacagaataggctcattaagatccgtttttgctaggcaatatgttcgtgttttatagtagttggtcgtatgattttctccttttgagattttcatttttgtttaaattttaaaatagtgatgatgttttcccttccaagtataaagtttctttaaaaaaaaaaaaagccaattaagaaacatcattcttatacatttgtggaaattcatagaacatgcaaggccaaaaggtgaactactgaagtaaactacactgggcactaatgatgtgtcagcggaggctcactgactgtaacagcgcgccaccgcggtgcaggatgtctgggtgggggaggttgtgcaccgaggcaggaggcatactgtaactttctggactttccactcagtttttctgtgaatctacaactgctctaaaatatggtctatcccttaaaaaaaaaataaatgggaggtaaccacaagaaacatccctcggagccatttttccaaaagcggtttgcatcatcttgactaaaggaaaagtatatgtcaccaagtaatttccaaaattctattttttatgccaaaatcatggaacgactgactctctagcaggctcaggaatgaggcgggtgtggggggacccactgttctgaatgcagtgacatgggcgctgtttcccagcacattggttcagaacgcgtctcagagaaaccaagtttctctacatcaaggactcaagtcctacactgaatggctctttcttcacttgttaaaactggtttgatcatggctttggaactccaaggtaaacagtcactgctctggagaagacatgctgctgtgacaggacttcggggtcacactacttacgctgtggctgtggataagatggtacctgggtgtgcatgtgacctggagatgtgggaagctgagcggcggcaacatttggactaatatttccatgcattacgaagcctggaggtggaggattttctccctatgcaatgagaatacggtaaaaaggaggattaccttcggaaccaagaatcttaccagacggatttataatctctaaaatgaaattttaaaaaatcttatgtaaaaaaaggttacattctatgcatactgatgttttctgagcaacacattctacgtgatttaaagattagacaggtccaaagtaataacagtgatgaatggcaagagatgctaacagcctcatcaaatagtatcgatgatatttataaaaagtcactaggattttccaactctactaaattccatccgtatctaatgctttgggaagtaactgtacatgccacgggggaattttttttttcttctttgcaatgctaaaaacggggaaaaaaagaaaagaagaagaaaaggaaagggaaaaaatcttcagtgaaattagatttaaaccactgatagaaccctggttgatgtttttctagttcaagttgtgctaaaaaaaaaaaaaaacaaacctgtttcttgcctcccaaaagcactaaaatgcaataagcagacaaacagatgggggtgggaaactcaagggaggtgggtagaagatacataactacatacatattcaggtgagcagaactctgctcaaagagggataatgaaggatatacctgtgtgtcagagggagaggctgcaggtggatggctgggaagggcggtaggagttttgttactccaggtagtgacagtgggggcaattctaacctgaattgaacaaagaaacaccaatcacagaacataaaaaaatgaaaatgttaaaagaagaaaaaaaaaaatccccgaaggcactaacagccagatgcaaagcaagaaagagcagtgaggcagcagcacacactagccaggcaactggtttcagggcagctgggattccaaaagaaaacacaagtctgaagaggacaggcagagggagacagcagaaaaatcaatacgaaaacgaaatcaaagcacagagaacaatgccattcaagtgtcaggagtaagtggggaaaggtacattctgtaagtaggcaaagaaagaagacattccggggggttgggggtgggcagttattgagaaaaaagtgatttttgaagcagtaattgtattcatgctacgattatatctgtggacatattgctgctatatgctacccttttcaggacttcattagagctacaaaaatcatgttagttctgtatgaggcttagagtcatacaatcggagaatattaaagatcatctcatctaatccccaccatttaccatggagaaaaaaacaagacccagggaaacgaaggggctggctgaggtccaggcaacttggggtgatggagctagggctgattccacatctcatgactcccagccagtgtttgctacactgcaccctgctacttataccctggagtccagaggctttcaaaatcaatttttaaagccatcaaaataatttttgtcaagtaaatctttgtaggaactcaatcacatcaacaattaatagccaagatgtgctggtggcagtcagaactcctgatctggcttccctttcatccttttactcctgcttgtaagcctgcctttaaaaccacaagccactgccctcattcagcacaccataagctttaatcaagaaaaactactcttagtttatgattgaacttgttttccttttcttaaagtagcagaccactaggtcaaagtacaacaaaagtcttttaaggtttccatattttccctgaaagacagataaactcgaggactcagggagtaaaattgtattctcccaaagaagagaatgccttactttggtgccctgagaggtcgaactcaaggtgctgagctgaggagttctaatcctgttaactactacctagctgacaaattcatgtcttaaaatcctgattagtgactggcttctccaccacctctcagcttcccagccatcacctgacgtgccctccctatgttacaggctttctaagactagcagtgagagtggggaatttattgttttgcctaccaatacaccctcaacagggagaatacaggcaggctcttagatttgtatttgtcaaatgaatcaaaaaaaatcaaagcagggtagtatagatagttataattatattcaaatgtaaccaattttgattaagtaccaagcaaaagcataactgacaaaaaaagcatgaatctttttcagtttttacagttttatgcttacttttgctacaacaaaatgtaaaaatgactccatcaattctactagcaatctgttctattttaaaatgggcagagtacttgctaactttgttataaaatcaagactatttattacttatgaaaataaattttatttaagaacatgaaggttatctggcctggaaatacaagtttctacatggaataacaaaagacagtaagaggccccattttataccactaaccatttgctaatttttatttaagaaataaatgagttcattaataaacacttcacactgcccatgacctacaacttcacaaacctttggtcatttgcttttctctttccaagttgttaaaaaaaaccccacttggattctgcatactctattgtgctgatacagaagacacataacacccacactagtgactcagaaaatataccttaaaaaaagactattttctaaaaatgttaaaaaaaaaagtaaccaagtcacccacaaaattgttcccactttacttatagtttgttagatgaatcaaattgtaaaaatttcagatttacttatagtttgttagatgaatcaaattgtaaaaatttcagacgtacatgtgcaatatgtttgagtgaagaaataaaaaatctccttagcttaaattaattatatctaatttatcaattatttgactagattagagggataattttttaaaatggatcataaatgctactttcaaggatagaaaaactataaccattaaaacagtatgttgtctacagtttcatcacaggccttttccccaacaaactaaaatcaccaatgtgatatacataaacgttcctacttagtctggaccatatcactcacatggggataatattgttgagctggaactcttggcatctgtgcgtggccagcaacaggtccaggcctgctcttgggcacttgatgcctctcataaggaattttgggtgattcctgttgtcctggtataggatctccttgtgctctacaaagtctgtctcgaagctgcacaatatttggctataagaagcaatggaagaaagccaagcaaattattaaagagttcacccaactatacatgacatattgatcttaaagtaggcatgatcgtccatatgatttttgttcatatgctgtgtattacaccacaggctctggcacatcagggtttgacatcacggtttccaatattcaagactggcaccaaaggtccatcatacacagtgtaacctatcatgtaactgagggaggcatttgagtcatgcccgccacatggcagtacgcaagactgatgtcactcatcatcgccgctcatgtgttgtcttcttgtagtgacagatgagtaacgctcacaaaccacaaaagcacaaaagttgaaaaaaatacaactttgtttctctgtaggcaaaaaaaggttccaaaagagaatcaactactaaagacagtcatggaaaaaaatggtgatctacgaaagagatgaaaattaattaaaagagaggtgcttgaaataaattaagagtcagatgttaaattcagggcagctcacatggatctacaatcgatctagagtaagtatgagctgaccatatacatatgttaaatgtttcagcaacacttcatgttagtatctataaacattatacatttctataaattcattaaaagtttaaagatatcacttaaactctgtgggtatacttaggtagtcttttatggagaagaactataccataatgatgttacaaagtctcagaaaatattctccagaaaatacttagggtatactgatatatatagtaggaagtaatgtcaaaattgaaagctctttaaaagtccaaagaaaagcatgaagaataatgtatagaaaatgtatgtgactataaacagttttaaaaatgaagagtttaattctcaggctagaagacctaaaggtcttaagagaaagttagttttaagattaagggttttagacctcaatataagcagaaaatcctataaaactattaaaccaaagtcattataaagactttgtttccactccacttaatgttctcattaacaattaagaaagatgtgagctggatcctacatgtgagtggatacaaaaccaactagtgtcctacctccaccatcccgggacacgggtataagtatttttacctaatgaaatgtactgatatgccctagaagacaaaatactgaaaactgagaaagttgtcaaaaactgaatgaattttagaataaaaagatcataaataaggaaaggctcaaaattaagctctagcagatacacaatgcagagtcacttgtgagtctggaaactcctgcagggaaaggattttggcaatcttaatcatcactacatattcagtcacttgctgaactgaaatgaacaatatgaaatgaataactgaaatgaacacatatgaacaaggctgagttatttcacaccaaataaggagactaaattatgtgtgtaatgtagtgttctctgccttggatactttaaaaatatactcgcctacagacagcaccagactgaaacagcgtgtagagtgaatgaatacattattacctggagtgtcatttgtggggattttaaaatcgcaaccccagtttggttaagtattaacctttatagcttctcaacaccgaagacacctaacaaagaatcttatgcacagaattagtgtttggcttaaaaaataaaaaactggttcttttcctactcattttcctcaaatactatgcccttcagtacaaagggaagaagactctatctctgacatagcctgtgtacacctaaattaaccttgaggacgcgtcactaatattcaccaatagttaagtgatagacactcaactgctccaactagtacatttatgtttaatgctgtgtgctatctactgaactcaccttactcattcagtaaaagaagaaaaatggccagttctaattacctggttggtgttttcaggaagaaaggccaaggctgcagcaatgctgccctgggctgccagcaagctggcatactgactcatcttctcagccagaagagcccctacagtgtcagggtccatggcctgggtgagctgtacagcttttcgcaggatgacaactttctcaatcagatcctgagtgagaaaaagaaaggggagtgaaggagaactggacaacgagaccaagatgtatactgaggggaagcaggaaaagataaggggttacgaagagctccaaagcctaccaaaagcaaagtgttcattatcaccaacattttaaagctctagaagagtggaccatcatttaggtaactagaaaagcaaggaggaagaaggtcttctacacatggttaaagcacaggttaccatcttctcctaaacatccttaactgccagatacttgttttgtgagttaaaacagccaagtatccaaagtgaaaaagacaggcacatgtccgaaggcagaaactgggtcccaggaggtagaagagaaaatattataccataaaaatagtagtacgatgaggtgacctccaaacgggcttagtatttcaaacccaaagtttctcatattgctctccgatacccatttcaacaagggagagctatgcatcaggtataaggtacaagaatatcccaactgcccttcataagtacaccaatccaaccttgaattgtgggaaaaaaagcgtcttctctcagaagcacttacaaggaaaaaccttgattcctacaagacttttggtttcagtagtgatctttaaagccacaagcctactgagaaaatctttgctaagagaaaacacacagactgagatttcttgagactctgatgactaaatgcttagggggggaaaaaaatctaaatatacagtactcagcacctgaccacagtccccagatttttttactttctctcttgccgtgtaatagtgctacatgggattccgttggtctcttacactaatttctcctgaaccctgaagactgtctgctggtacggaggactcctcccactcctgaccccagtgggtttcctggcccaaggcaaacaggatccctggaggcagaggaggagcatgaggaaaagagggaaactggctgtccccatgctcctgccacttactttcctcactattatattccaatttcgtcctcataaacagctgcattcccagttcactatgccatcacctcaaaggctgcctttccaaatacagcagtaaatacacataattacccagccaaagaactaaagcgtaattaagtagggtgaaagcaatgaacacctggaacaaatcagtctctagaatataaggagggtgaaagacagcactagaggaacaccttttgtttcaaagctactaacctggagggacaaaggactgctaccatcttgagctttagtccagcatgcaactagtttctccacattccctgcacaaatgtagcagagacaggcctgagtctgcaggaggctatcaccttcactttcaagtctggttcccagaagatctgtagaggaaaacaaataagtttacacataaggccctctgtgtatgaggtcatgagctgcccagtaatattttcagagatatggatcaaactttataaccattgagtagcaggcagaaataaagtcactgtcatgtcaatattcaataaatactaagtggtgtgacaaattatatacaatttcataagattctatacctagccatagaataaatctctcctcatcacattagaaaaaattaaaagtgggaacgatatttgaacagaaaaatcctaatgaacatttaactgcattttatcttgtccagatgcttttgtaagcagtggactaaaatatggcacatttggtgtaaatatcagtaaggaggactatgctgaattatttataataataaagttaataccttataatttttctattctcataatactttcaaggttattcgtttttatgccagcagcctaaagcttctgttcttgcatataatagacattatgtctgagttatgagagtttagtcatggccttcaacagtaatttctacttattttatcaagctaacatttattaacagagggctgattatgtgccattttacatatgaatagactaaggcttagaaatgaatttttcctagttcatacagttagtaagtagcaaatgcaagagtctcagtttggtctgtgtgaaatcaaaatcattaaacaatattttaaaaaatgactagaagttatggagaaacaacgcagtcaatacttctgagaaaagcattcaaatgagaacttcatttgcttattctgtgattagtagtaggtttacaaaaacttctaaataaaatctgtcactaattttacttacaatgtatcatgccatgtatgtcatataaaattcattttcttaccacaaagggcggaaaattcatctgctttagcataagtcaacactgcagctaatgcctctctccaatttttaagatcacaagactcaacaatctctttccaattcttcatcactactgccatgattagcttggggaaggaaaaccaagggacaattaaaagcctttggtatactaataaaaattaactctggctaatcaatcacatctttcaaactactgttgacagtatttcatgcaaaaaaaaggagcagcaaagtacatccttaagccaactgacattaaaaaaaaaagccatataattttctctcataaaaaaaaaatcacagtagcctattttacaaaaggctgagaaggaaaactatatatggtgttaaaaaacattcctggccaagaaagtactaggggcaaattcctgggagagaaaaggattaggctgtgtgaggaactgaaaggcagccagtggggcagaaagtggatgggcgggactgacacgacccaagcctggagacgaatagcaacccaggctggtgggactgagcgctgaggcaactttcatgggaagaaatcgaatatcgtcgagcagggggcttaaaaatctatagaccctctgcaccagaaattcctttccgaggacctcagtctcattaaacaattagaaatttgtacaaatcttttaggcacaataaggatgtttaccactgtcttaactatattaggaaaatataagaaactattaaacatcttaaaataagagaaatgatatagccctcctatagaatattacagggcaattaaagttttttgtaagaagcttcaatgatatgggaaaatgattacaatgtaagtgacaatgtctataagtaaaacaacacacatattacttccagaatcttgattctgtttttaaaaattctacaaatgcgcagagaggtatacaaaaggttatgtaccaatctgactgaagaatcaggaagtattaaaatgtttaacattttctatgttctaatctttctacagtaaaaatatgaaaagcattttaattaaaaaaattatatatgtaaatgacaaaaacctgggataatcatgctaacctgttaacaataactaatttctgggttaaaggattatgggtggtttttttgttcttcactgttttctccattttaattatctataatgagtgctttgctttttacaaacaaatgctattatttattattaaaataacataccctggtaattttgctttgggattttgcaaagtatttcttctgggttcgagctaagagttcttgtccacctgctatggccaatataatggcatcagccatgcggttatcatgtaaacaaaggtcaacagcactctcgaagttacccgttagcaaagcctgagtaattaagccatcaatatctgcaataaagaaataatacactcaaattaataaaagtttttgttacaagaaaaaaaactacaactatcaattattagtacacattcagcagaaaacacaaagttgaattctgaatattactggtaggttaatctctatcacaaactgctgatatctacagaaacatactaagctgcatgtaaataaaatcaggtaaaataacatatttttcagattgcttaatgcaataataaagatcctttacagtttttatgacataggtatcatcagatcatgccatcatttttaaggtactgattacatgtactaaatgataactgagttcttcttttcaacctttaccacatgtttgacaaaatgtttctgacttaaactcagggactatttgctttcaaatggttaaaaaatttgatatcaaaaccaacagatacttacccccactgatagagatgttaaatgttcctccagctgttggtagaaattcagattcttgtttttcctctttaatttgctaaagagatggaaagagcagcaacttagccggaatggaactacaataatttaccagcaaaacaagatttaaatatgattacttactgcctagatgacatgccaagttatcccagagaagctctcagattcaagtttacactaagatatatgacatccttaagaattaactcttatcagataatcataaaataaaatccaatgtcatcagaaacaacatgaaacaaacttaaatgtacatattcacaatggtggctcagaagatactgaagctgaaaaatctttttcttagatatctcaactaagagtagcctgagacacacaaaatatgttttaaattacattacatttagatcttaaaagcaactttgcttccatacatctaaaaacttctgtccaagaggtgtagttttaagagtcttttggttgtaactgactcagctgtggaaaaaaaataatgcttggcgtccttacataaatgcagtgtaaacagttatttatcaatatactcaaattcaattagagattttgtgttcacttcaactaatcatacccggaactgcaggctggtctggtaaaaatgtacacagttctgttataaatttctgaaactagctgtaagactgagtaaaaataaattcaatatcttctttctttagaagaaaagaaatgtaatagaggccttctgctggcaaatattttaaatgttttctcttcaatgcataaaagttcaaaagaagacaaaaaataatatatatcagattatagaggaactaaaagaaaaaacatgtctgtcttacatgagataaaattttatcttctgtgctcctgttactatacatttgaatcttagcacccagtattcaaagtcaggagcatttttgaattggataattttagtgtagcacagagtatagcatcatctgtgaatgaagttaaatttagttaaaattgactattacaggaaaataaccacaatcttaattccttccctaacaaaagagaaaccttttagaatttaaaaactgaaataaacttttaaaactttattcatattgtactgatgggctcagttgtgtccaactttgtaaccccatggactgtagcctgccaggctcctctgtccattgaattttccaggcaagaatactggagtggattgtcatttcctcctccaggggatcgtcccgacccagggactgaacttgtgtctcttgcatctcctgtaccagcaggcaaatttttacaccactgtaccacctgggaagcactgaggaataaatcagatacagatccgattatattcactaacaaatttacccaaaaaatcttttttttctcttaatgatttttcaaatttgctttcaaaaaactaataaacccttatatatggacttctaaaacatacacaaagccaaaatatgcacaatttattatgtaacgtgtatctttaatgtctaaactacattttattttatataattatagcatcatcaggattaaggagaagatatgaccaccttaaacatttttttcaaatattctgaaagcacatattgatgactactgctttgtttcatacatatattcctattaattcatgagtggatttctaaacaattctctatttgtatagaaatagtaagtccagctgtatatgaatcaaagtatctttcttgaatgtatcctacaattctaggtattcccaaagttagttcaaatttttagtaagattttatccatatcctttatttttgagttaaataaatgcttgaagatccaattctgaggaaaatatttataataatcatcttgtaatagtctaaatttaaagaggaattatttttataacttagtaaaaggctctaagaaactttagtcaggatatctccatatcaaaaagaacaatgaaaaagtcaaacatgagatgagaaacaagaacctgttgattaattttccaagatgaaagaaatataattagaaagcaagtaaagtaaattatagaattatttattagtggtttaaaaaacccataagattaaaaaggaaaaaaattaatgatacaactctgtgttcaaggactctttttttacctataaaaatggtcactataactcaggatgcattgtctagtgagtcagaacaatcagattattagtgaaatattctttacttgggcttcctggtagcttagatggtaaagcacccatctacccacaatgcaggagatcagggtggattctttacttggactcaaaattcaagattaattcagaggcctatgcccctgatcgtgagccttaaacattaacaagccaagaaaaaacactaatgttgcatgcaatgcaatgtggatttctgaacaaaatcttttttcagtttgcaatcctgatatactcacatcagctgttaattttaaaccagataatccagaagctaggtcagagaactgaagactttagagatggtatgtgcttagtcactcagttgtgtccgactctttgtgaccctgtggactgtagcccgccaggctcctctgtccacgggattctctaagcaagaacactggagtgggttgccatgcctttctccagggaattttcccagcccagggactgaacccaggtctcctgcactgcaggtggagtcttccatctcagccatcagggaagcccttagaggtgggacttctgtcaaattagtaaacagactccaatcttaagcatcgctaagaaaatatatgccagctttacgctggaacatgcagccaagaaattttccttgtttcactgtgagataaacaaaccacatgttttccccatgttaaagatgagaaaaataagtacctctcccaagagctgctcttcagcagcagggctctcctccccgtcaccctgcgctacttggtcagagtctttaagagcctttggtacacaaaacagtgacagacggggttgaagaatgtagcatcaaaaggttattagggaacaaggaagacaaaagacccaaccaacaacattcagagctagtttaatcacaagaagttacactgagtaaatttatttgaaaaacatcattagaggaaaagcaaagagccattattgctaagacccaacccctttttcttgccaaatgagaattatccatgtattaaaaacatctacaattagtatttttaaattgtaaagcagtaagacagacaaaaatttcctaaactatattttcttctttatgacctagaccaaaattttagaaggtagctatttttacaggcctcctcttaccacatcaggtccatccactttgttcaaggccaaagcaatctgaaataaagacaacaactcagctaccaaagggagttaactctatttcaaggcatagagcaaatgttcacctactactccattctcattggcaaaaatccaaaacaggttcaaatcagggatagcatgctcaagagcagagtaaaatgagtgcagaaccgattctcaaggatgctggtttcaattacgtagatttattactcacatgtcatcttactctgctattcagttgtaaaactaacctcaaaacaagcaggtttcttctgtcttaaataaccataaaaaaaaatttcttcagatactcactatggaaagaacattaagagtattttgacaatctaattttatctcctcatttttttgctctcaggtatgcagtaaaactttcatgttaatctcttgcgttatagcatgaagaagttcagactaacaataaagttaaatacaaaaaaaatctaaagcagtgagcaagagacacatggccagtaagcaggggggctctgacgtgagcccaagtcactaatcttccaagtgctcagcactgcctgacaggagcgcacaggatccaaccggctgcacatgcgtgataaccctgcgatgctatggaaaacctgagtcattttcaaagaatggcaaagggctaatacagattacacaaagaatccaatatagttccttcaaggtttccaaggtcagagtgttttaactgctgttaggccaacactgtcgaataattattaagctcctcagagaagaaaacttgaaaactggaatatgacctcccatttttaaaaagcaatcttttttttaaccttaaaatattaagcaaaaacaaacaaaagaaaaaacaattaagcaaaccacttgggctttttgtttattcaggctcagtacagtaaaacacctttgttccaaaatatttattaatactagttacttgtgagctggaccaactcaatacacagtttgggaactgtgagctgagggcataaatagctggggtggaaaacagtaccctaattttcatcatttaagctgtagacaatgcagggaaataaacttttccctctctttcctccagagccactgactactcatccttttaaaactctacgtgctattcccagtgtttgaggctcactgcttgttttaaggcccaactgacacaactctttagatcaaatttaaagatggttctggcagcttctaaattagggtattaccgatgaagagtttcgactttaacaacataaatccaaaactctggcgaccaagcataaattcttattaaatgtttactaaatgatttgaagtaatctgtaaaaaacttaaaaaaaaacacaacacctacactacataaatatctcacctgtgtgagcacagcctttaaagctttcccgaaagcttaccttctttcctaggtcttcttttctatatcctagaagttcaaggtattttccacgagaatcatcctcaaagtttaccttaaaaaaagacattttcttgaaataaagaactgcatctaaaggcccagtttttaattaactgctcaaattccaagtagaattatttaaaatatctaaagtctactatatcaactagaagcttcactgtaagagaatttaaagtttttttaaagaatctattttttaagaaatagtaagtctactagtaattaattagccaagctgaataaagcttactttcaaactaatatttgtaaaaacaaactgagtcatgtccaaaggctacataaatgcaaaactcacattatgtgaaatattcaacatcacatgctaaaactttcttgaaactagtacttacaaaacataaaaatgaatgaaatattattgcattcaagagctcttttctttgcaaaactcagacttggggaacagacattccagtggaggcaaaataatcaaaaagaaaattatatttgctattttactgttataaacgcgactcagtaaacgggatgagaaatgcctctgacctctcccctctgcacctagtcccttgtcccccgctgtctctaattggacttactacggaaacgaaacatgctatgtttttattatactcagctctatgttctaattttaagataggtctgctgaatgttatgtctcttaaaaacacttcagcacttaaaaacatctagcatattatttaaaaagcatttcatattaggcttttcaaagccaagaaggaactcttgacataaagcattatttcacatgcttttcataaggttttctttaatttcatcacgagatgccccaaatcacactgcccctgctgttgctttgacaggaagacaggtttagaatgtgatgagaacagttaaacttgcagataatgaaggaaagctgcttatcaccaactttaccttcaaaaaggaccacacgtttttttcaaactcagtctgagaagcatcgatcttcttctgacagtaactgacgaatccctgtgactgaacgacctgctgcagctggtccgatcggctgaggaactccttctccgtcaccacctgactgatgaacacgtggtgctgctgtggctgctgctcaggccccggctgaggctgcgttctgacattcgcaaaggtgaccagtttgcctccgaactagaacaggatgaggaaacaaaatcagcttgagacacaaggacgtggccccctaacgtgcttctcgtaaacctgctaaaggaaagaaatgtgacccacacgtctccctctgcatgcaattcgctgatgctctcttccatactccacgatctgaccccagccttcaatttttactccttttcataacactcaccttctagatgcaaagtcctagcagctgcaccctacaatttctcacctacttgcttttactcacttccacatactcaatgtgactcctcctcaaggcctgggcaaaggtcacctctgccaccccagataccctcagtatattacatttatctctccctcttttgattcaactattagcctttgtatttgcctcaccttctactctaggctctaagttttaaaagggggtgagtatgctgctacaaaacatgccatttggcataaggattatcttgagctgacatgagtttgagcaagctttgttggtgatggacagggaagcctggctcgctgcagtccttggggccgcagtcagatacgacgtagcaagtgaactgaaagaatactgagaaatagcaggaccaagaaagacacactgacctcctcttttctctctgaaagtaggagatgaaactcccatgtgagagctgctctccttatatcaggaggaaaaaaccactcatctccagagatggggagtccaggacagtagaactctgcacaaacagaacttgataaatagaaatcatctccctccgtctctctacgtattttaattactggtccacaactgccgttctttgctcaacctagtctagaagcactttcgctgtgccacacctttgggtcttcatttctctagggggctcccacatacaggtttgctatcattctcgttataagcaggctcagaactcttcctctgccgctcacagtcactcctcagcttcaggtattgatttttttcttaaacctctttcatttcttccttttacattgctatttttctgcctaattcttttcacactgaactgctgtatgactgcatgtctattggttgtcttttcctccctccaatccatgctacatactatcagttcaattgctcagtcgtgtcagactctttgccaccccatggactgcagcataccaggcctccttgtccatcaccaacttctggagtttactcaaagtcatgtccattgagttggtgatgccatccaaccatctcatcctctgttgtccccttctcctcctgccttcaatcattcccagcatcagggtcttttcaaatgagtcagttcttcacaccagtggccaaagtactggagtttcagcttcaccatcagtccttccaatgaatattcaggactgatttcctttaggatggactggttggatctccttgctgcaggacaacaccacagttcaaaagcatcagttcttcagtgctccgtcttctttatggttcaactctcacatccctacatgaccactggaaaaaccatagctttgactagacagacctttgttggcaaagtgatgtctctgctttttaataaactgtctagtttggtcatagctttccttccaaggagcaagtgtcttttaatctcagggctacagtcaccatctgcagtgattttggagcccagaaaaataaaggctctcactgtttccccatctatttgccatgaagtgatgggaccagatgccatgatcttagttttcttttcaatttttactttattttgctttacaatactgtattggttttgccatacactgacatgaatccaccacaggtatacatgagttcccaaccctgaacccccttcccaccccatatcatctctctggatcttccccgtgcaccagccccaggcatcctgtatcgaactgatcttagttttctaaatgctgagttttaagccaactttttcactctcctctttcactttcatcaagaggctctctagttcttcttcattttctgccataagggtggtgtcatctgcatatctgaggttactgatatttctcccagcaatcttgattccagcttgtgtttcctccagcccagtgtttctcctgatgtactctgcatataagttaaataagcagggtgactatatacagccttcatgtactcctttcctgatttggaaccagtctgttgttccatgttcagttctaagtgttgcttcttgacctgcatacacatttctcaggaggcaggtcaggtggtctggtattcccttctctttaagaattttccagtttgttgtgatccacacaaaggctttggcatagtcaataactcagaagtagatgtttttctggaactctcttgctttttcaacgatccggtgaatgttggctatttgatctctggttcctctgccgtttctaaatccagcttgaacatctggaagttcacggttcacatactgttgaaacctggcttggagaattttgagcattactttactagcatgtgagatgagtgcaattgtgcggtagttcaagcattctttggcattgtctttctttgggattggaatgaaaactgacattttccagtcctgtggcctctgctgagctctccaaatttgctggcatattgagtgcagcactttcacagcatcatcttttaggatttgaaatagcttaactggaattgaatcacctccactagctttgttggtactgatgcttcctaaggcccacttcacttcacactctaggatgtctggctctaggtgagtgatcacaccatcatgattatctgagtcgtgaagatcttttttgtacagttcttctgtgtattcttgccacctcttcttaatatcttctgcttctgttaggtccataccatttctgacctttattgagctcatctttgcatgaaatgttcccttggtatctcattttcttgaagagagctctagtctttcccattctattattttcctctatttctttgcactgatcactgaggaacggtttcttatctctcgctattctttggaactctgcattcaaatgggtatatctttccttttctcctttgccttttgcttctcttcttttcatagctgtttgtaaggcctcctcagacaaccattttgccttttggctacatactaatcttcctaaataacagatggttgcttacatcacttgtaaattcattcttgatttaattaatttctcatccctagtgctggtcttctctactatctgctctcctgtctctgaatcttcactttcacttgtgactttccactttacttactgaatcctaaccatccatctagttagttctctacttcccaaagtaattaaaacttattataaaattatatatggataaggtttaaaactcaaactgtacagaaaagtctccctgccccccaatacacactatttgagacacagactctatctagttgacaggtgtgtttccagtgcctaggagggtgcctgacagaggatgttcactatacatatttatcttcggaatggaaagtgaaggtccgttcactagtactgaagtattatgaagataataactaacactctcttcttccccacatgagtttggcaccaaggatgagagagagaatccaaatgtcagctttagtgctggcgtcaaggtgagaggccacagattagatgtgcaaccacagtggacctcgtaacaactggaatgcagcaccctgccaccccaaaaagaaaagaaaagaagggatgaaggaagcagagacagagaagggtgacaagtataataaagtggggcagcgggacagtgcaaaggctgcaaaacaaggtgaatgtactcaatgccactgaactgctatattttaaaatggttaaaatggtcaattttatgttatgcatattttatcacaatttaaaagaaaaaaagggagtaggttccactcttcctgagaagtctttctgaatgatgaaaactcacaaacacatctcaaacttggccctcttccatctgagagatcttataataatactctgtcctcggtgtttatggaccatagaaacaaatccacctactgagaaggaagcaccaacaggccttcggatccatttgggtggcttcttcagaggcagcacgatactatgtggggtcgtctgctgaggaatttgtaatgggggaagaggctgtcctgtgccgaaggggtcaagattcccaaaagatgatgaaagctaaaaaataaagtgggattttcataacttatacaagactatgttacacgttttcaagtcatactgaataaatttttttacacaattttccaagtaattggtatcgctgatctgtaaagtcattttcaaaataattatacagtaagatcattcttttcaggtgttgtaattaaaaaaagtgtaatatttcctattaccttgtcaacttgtttctgtcttaaaccatctgcgctccctcccatgatagaataaacgctgatacgcccatcaaaggaagcagctgataagacagcaggatttctgggacaccactgaatatcaaagcaccattgtgtgttggtgggaagttcatataacacctagaccaaaaaaaaagtatacaggcgctttatagccaaaatagctgaatcactatgatcaacaagtacaactttaattaaacatttacttttaggaagtgtacagccaggaaaaacaacaatttaagaaatttctttaaaatacaagcaaagttcattatgacaaaaacaaaaggtgatcaaaattttgaccagatttggagtaagaacattttaaaaactgagattttcctatttttattgaaattgtaatagaagatgcatctgaaagatcagaatactgtattaggatcaacttgctgaactctaaaagggttctatccaactgactttgctggccaagatccaaagtaccatgtttaaatcatttgaagatcaaatttcaaaaacaactcttggggggcagtgggggatgggatgaactgggagactgggactgacatacatacatcgctatgcataatagatgactaattgtgaaaatctactgtatagctcagggaactatactcaatgctccgtggtgacctaactgagaagaaaatttttaaaaaaggggatatatgtacacatgtagctaattcactttgttgtacagcagaaactaacacaacgttgtaaagcaactatactccaataaaaattaaaaaaaaaaattctggagaaggaagaattcactgagaagactggcttctttcttgtcaagtgagaagacacgcacacatcattcttattgctgcagaatcaaaacagaatttggcataaacagttttctttaggaggaacaaaatatagaaaaatgattaaaaatggctgatataaataatgtaataattgtttgctatctttacaatgtaatcatgtaataattgttgctaactcatagtgtgatgctgactgatgctcttaggagcataagttttataggtttaagaaataagtcaaattagcttaatttggacttcatgtgacattttaaataatgttttactctataaggaaacagaattaagtgaaaaggcatttagcctgctcatttagcttatccatctaaatttccataaatagaacacatgacaaatatttcatgataaagtatcatattcttgctgtacagttcagaagagagattgaaaatctacatccactgattaccaaaaatcaaagaggaccttcaggacccaaaccttgaacagtcctactctgaggacactgatttccagaaaacaccctaaataaatccaaccaactatttctgagtctagataaatgccttatattgttaatgaggggtgggggtggggtgattactaggttcaaatacaccattttcaatgactgatatttccagatgaaaatagctgggtttagataaagtctctgctaggttaacatttcatacacacctccatctactttcacattcttaattttaatcatgtactaaagaattcatatagaaattttcttattcagctagagttaaatattacaatcactccaagtctgagaaatatctcctccccatacctctcctgtgtttgggttggagcacagaatcttagcatctttcccacagctcagcaacaattcaggatccgccatgctccaagcaattgccaaaatcccccttaaaaacacaaagatgaaatttttaatctcaagaaaatgaaacctgcaaattatttctgtctaggctttggagagacacacggctaacagaagtacaatttcatataatctttctggaatgcaatttagcaatgggtatgctctgtgattattacaaagatgctcaatatagagtacagtgtatgatggcaaaaaagtgaaaacaaatgcccaacaacatggtctacacggggttttcctggtggctcagcaggtaaagaatccacctgcaatgtgggggacctggatgtgatccctgggttgggaagatcccctggagaaggaaatggctacctactcctgtattctggcctggggaattccatggactatatagtccatggggttgcaaagagttggacacgactgagtgactaacacttctactttcaaacaaagttacattttcagtaaatgttttgaaaaattcagattagcatcccctgcaaaaatttaagaaatcctgtatcctaccatccagaaacaagtactatataatattaatagtttgttttttctacattcatgcctctgctatttagagatgaaagaaaagtcaacattaccagaccatgaagaaaaatactagaaactagaattatgtatctttcttaaaacaaaaacatacaaatagtcctcaattattctgaaaacacagtaattctaaaataatttttttttcaatttccaaaatacaggtaaacctcaccatcgaggtagatattactcttcttttccccaaaagttgtttttaatatgatgacatttcttacaatctaagtcctctcagaatcagaaaaatacgctataggaaaagaactcaaattatttaagaatgcctttgcttccaacattttactttttaagcattaaaatctttgtaaaaattgtaggatagtgtgatgtacacccttatacttctcacttagattcatcaatttggccacattaactttaggtctttatattttacgcgcgctctctctatatatattgcatctgtcaaatgcagattattacatgacacctctacacttctctctggtgataagaaccttctcctatatacatctcatactgaaaatgttatttttatgcaatactctaaatagagagtccatattcaactttccccaactgtagcaatgaatgtgtgtgtgtttaagtcacttcagtcttgcttgactctttgcaaccccttggactgtagcccgccagagtcctctgtccatggaattctctaggcaagaatactggagtaggtttgccatgccctcctccaggggatcttcctgacccagggactgaacccacatctcttacacctcctctattggcaggcgggttctttaccactagtgctacccgggaagtccatttaggaataatggagtcttactgtctcctctctttagaatccaattatgcatgtcaaaagtttcaaggcacgtcaagaatgcctttagatatcagtatcatatttaatatcacatcttaaagaacatttaaattcttagcaagtgttaaaaaaaaaaatcactgaactatagaactagaaggaccttaaagatcatataatccaactgttgcattcactagagggagaaaacagaaacagagaggttgatttgctcctggcacccagtatggtattctgtcttgctaaactgtggccactctgaaaactggcagtataatgtaatgttaacagcatagatacaatgaccaggatgtttgagttggaagtcagcagctgactacttttgatctaaaccaagtttagccttaccaagtttcaatttccaatgtgtaaaatgggataatagcatttacactacaggtttactatgagtcttaatcaagccaacttttgggaattagggactaatatgtatacactgctgtatttaaaatagacacccaacaaggacctgttgtatagcacagggaactctgttcaacactgggcagggatttttgtggtattactgaatcctagtacactggttggcatgtgttcgataaggaagtgtttaataaataaataaaaccttaccaaacatgggaaaaatattaaaacttctcagaatcaccccttctttactaaaaagctgactgaagcataacatctaaataggactacattgggtgaccagattcgtttctcctttatgagaagctcaaggagaggtcacaaattttaagacttctcaaagtgtataattctaccacacacgggggaaaagaaatttaaagctttagtttctatatccctaaaaaggaaagaagaaaaaagcccaaagcagtgaaaatactttaacactgaaagagatttgtttcttgtttaaaaacactgaacgaaacatacataaactccctgggtacctgaatataaaaatcatagaaaatcttcacaattacaaactaattttgcaccttgtggatcttagctcccatgccccttacagtggaaacacagagtcctaaccactggactgccagggaattcccacaaactaaatttaacgctactaaagttaacacaagacaattctcatgttttttagagcatccacacacttactaaattgaaggcagaatgaaccacttaatatctcaaaaatgtttgcttttaaattaagataaacactcagaagtaaaacaaacttttcaattgttgcttgacattaatgtcatggaagactcttcataagtatgacgaatcaaataaagatcaaactgtataatggcccaaagattcaagagttgtcccaaagagctatgattcactagaattttgatctattacctattatttgaaataagttgtagaaaatccataaacacattttcatgtttttgtgatatgatttggctatcgtgttttggtacaaaaaatcagatgactattgcttaaaatagaaatgaactatttatactaactttcgtaagacagagacggagtagattccctaattttaaaaagttatctgataattcaaagcagtaagtaaatacatttttaacaattcataaatcaagctttttggaagagcagcaagatacctggcatggttttccaggacacggagtggagaggaggcaaagcgaaggtcccacatctggactactggtagcctgtcatcctcagaggcaaggaccatctgagtggcaacgtcaggatgccacgccaacccagagcaatgcatctgcacacaggcaaggctcacatcttatcaatcacactactttacgaaaagccaaaatgaacacgaggaatatatgtttgttgaagcaaatagtagaaaacatcagctcaggcttatgaaaaaagtattcttacttatgtagtcattattttattattttcatttatttaaaatttgttttttaaaaacccactaaactattaaattctattaaacactcttaaacagtggtcttaaacaaacgagtttaagtgttttcaattcaaccaaccctttgatacaccaaatcattccaggccagagtaattctataccacaaatgagctgtcctgtcaaaattgtaataaggggaaaagctttacataaatttaaaatttaatacttttagagaaatgaagatgagaagatttaaaaaattaatacctttcctctactttatcagaaaaatcaagataaagtgactaaaccaacaactactgtttaaattttcatatgggataaattaacattattactgagaaatacttggaagctcagatcttgttacgtgttctagaaggtgactgaaatgcttattgtgtactttattccactgaaacttgttttaaaactcctgacacactgaaaaacaatactttgaggaaatattcttataaataatgttttctcattgctatcgttgtttttaaattatatatgcattctctgatttaggcaaactcactttttaaatgtccaactaaaaacagtgattaaaagcaaattaataaggcaagccctaaagtgtgtctaaattactttataacatatgatgacataatattaatgaatctgtaaggttaaaatgtaaggtgttatacaacagcgtctactgagcaagtgggagaagaataccagttcattttagcactgcctaatcagaaaagaggaacccaagagtctggaaactacagcttcatagtcataaaattactagcagggaaaaagtttacattctagttgctataatgctttggaacagctggcaaagcacaacaactagtgtatcatggaataactcctttgattaaccaatctttctcttcatcattaatatagccaatgtggtttagtagggattttattattttccccaaagggaaaaacaacctctcattccaacatgattggtccctaagacaacaggatttgactttatagaaatctgatttgttgccacctctgacaaacaatataggaatagctacagcagaaacaaaacatgtttctcacaaatcaatcacatacttaccctgttactatgatcactaactttgatgataggctcattttttctaagatcccacacagtggcccgaccactgggactggctgatgccaaaatatgctgaacttgtctgttccatgcaatgcagctgatatcttctgggggctgtaatgaataaactactaagaaccatttctcaactgtaatcaagtttaactacaaaatctaattcttctttttagaaaacggattacttaaaaatctgatctattccttccataaatttatttttatattcttaagttctcaacatatgcagtttaaatctcaggtatataccaattcaagtactttaccctgtctattcaccagccacttattaacttcctgttacaaatcaagcactgtttctttactttgcaactgccccatggaagataatggaccacaaagcagatgctagtcaacgtgacagacatctaggcagagcaaaaattacagcctagacctagaaaaccatatactatcgttacactacctctcagattgccaaaatgttagggcctgttacaacagccactcgaactgaatagttaatacagtgtaaaaaaggcggagatgtctgttctttctcagcttattagaattatataggaaagagggtgtgtttctttttttaagtaagtttcctctctatgatttttattctgaggttggatattgctaaaatactatataatgtagaacattatattacataaaatattatacctaaaaaaactttttaaagactattttatttattaccacaagtctagtacctcaaacaatgcctgggagatggcaagtactaaatatttactgttgaaggacttgctgatactcttaggaaacatatttattaacacttgatcatggtaaagaaaaatcaatgacatctgaacactgactttaaacagatatattttgcgtgaaaaaaacaaataagtgcagaaaaaccaattttggttcttttgattacattgaaatcaatgtaatacctgcgttttggctcctggtgtcattggagttgcaaaattatttagatcccaaatgtagatttcagattcgttagcaccagaggccaccagattagtctgcaataagaaagaattaacaaataaatagcacttacaaataacgaagagaattcagaataacccaatttggagctggagagatctgttttcacagacactgagaacagccagggacatggctggtgggggaggtgggagagtgggctgtagggagagagtaacagggaaacttacattatggtatgtaaaatagatagccaacaggaatttgttgtatgactcagggaactcaaaccgtcttgttaacaacctagagaggagggatggggagggaggtgggaggtatggttcaagtgggaggggacatgggtaagcctatggctgaacaccatactgtaaagcaattatccttcaattaaaaataattaactttaaaaatctttcagttttaaggcatataatttttctgtttaattaaaaaaaaacaaaatgcatgaacccctaaaaactatatataacaatctgaaatttaatcagttttctaaagaaacatattgtaaaactttattaaactaaaaaagataacacatctgccatttcaatataagacactaataaaataattaaatggataaattcttatatggcgattattgcctgtggtttggatctctggaagggaatcagattgtgggagacaaaaataggtcaccctgttggcttcaaatagctgaatgctaaaataatagtgtctataccaggcacttcaaagacagcctttagcctccaattaaaataaataaataaatgaataaacaaaactagtttctggtgtaaaatgactcagttatatatatatatatttccattatagtttattttattataggattttgactatattactagttccctgtgctatacagtaggaccttgctgtttatctgttttatatatagtagtttatatctgctaatcccaaattcttaatttatccctctccaatccctttcccccttggtaactataaacttgttttctgtgtctgtcctcacctatttctatttcatgtatgctccatcttgcgccaggtggtagtatttctaggtaaactatgttgtgtaccttttggatcaaaaagaccctaaaattgtgatatgaagtccaggaagacaatgaggttcatatactgaccttcatcctttactgttcactctcattaatctactataacaactgacatacaactctgaaaacagaggaattccatggcagtagccacctatgataagacacgaaccaaaaatcagcagttgttggaaattagctatctaatctaaagagtaggcaccacaaaccacagaaaatgaagaagctggatttctgtatttctatatctaaaatatctatttataatacaagaaaaataactatcaaactttttaagatatttattttctgattatactcaaatatcctattaactcaagatttttattaatgtatgctgctactgctaagtcacgtcagtcgtgtccaactctgcgaccccacagacggcagcctcccaggttcccgtccctgggattctccaggcaagaacactggagtgggctgccatttaacatttctacaattaacattcagtaatgtttacaatggcaacagtacaaagactcttaattgcccattaaatttatactatatttatgcatatatcttattatttgatagagtagtaatctctgacataaatacatttagcagtaataaaacaacagattaacccccacataatagtaccagcctaatgctgaactagcacaaactttttaattttaaaaattattttatttacttatttatttggatgcaccaggtcttacttgtggcatggagcgtctttagttgtagcgtgtgggatctagttctctgatcagggatcaaatctaggccctcctgcactgggaatgcagagtctcagccactggaccaccagggaagtaccctagacaaacttaaaagactaggttttcaacctctgaggtgcctaagattttaaaaatgtccataaaatggcatgacatctccagatttctagaactaaacccatcaccctgatcccttccctggggctagtgtattactcacgctgaagccagctctgaacttttcattcttcatacaaatatactcactcatcaacctgcacaggcacagttttagctttctccaagactgaggcacagtagactcatatacttacttcaaataggcagcacatatctcaagaaatatgaataaacatcaaaagtctaacctggaaaatgttcacatccagtgctctcactgggccagtatgcttgtcattctgggcaatcacaacttccttatccccagcgataattttagaaggatcataaagaataatatttccgttttcaccacctgcaatcaggactccagagatatttcctttggaatccatcttatgaggtccccaaatcaacttgtggtacctttaaaagaaaatgagcaaaaatactcttttttgaagtcagataaacttagaaaagaatttggaaattatacatttaagccttttcataaatacaccaaaaacactgcttctcctctattcctggtaactatacataacttggtgaaatggcattttagcttttatttatactcatgtttcattttgtaaccttgaagggtacaaaaactcttttgtacagctaatacaacaaagtatacttgatttgtgtgtcagaagataagagcctaagaacggttttaccatttagaatctgtgagaccctgagccagttacttaatctccctaagctgcttttgattcatttataaaatagagctaatcaaccacttccctggattttatttgactacagaagtattcagtaacatgtcatctgttaaatagtaaagcagttaagggagtcatctgaaattttctaagaaaaataatgtattctgacagtaaaaaggtgatatcaaaattatgtctattatgacataattctctacccactggtggagaataaaagattacaatttggtatggaggtggcatggagatatataacaatggtactgagtagaaaatctgccagatgaaaggcatctggggttcccagtacagtgggagggcttggacgattataagccatcccatgggagacgccatgatttgaactgtattgttagcccaggtacaatctcttcaccaaaatttgtcaaggtattaggctactgaaattaaagtatccttctatatagcttaagtacttggaaatctacctatctaaatacttatcatatcagaaaccatgtcaataaaattctctgtgaaatgtaatttgaaatatacattagtagataggggaaaaaagcaacctctactcaaagaaaatcactattaacattttaatatttatctaaccactttttctggtcatgactacctttttctgtaaagagggaagattaaaaaaagcaaaagaaagtaactctactgtatcatgaggaaaaaaatactataaactagaggctttccttcttacacacaacagtccgtaaagaaaggaaattcaacagaacatatatagacactttttaaacttctgcctaaacaactcatatgttttttcacaaaatatgtcactaatgatattcgttacaacttcataatgggacacttatagacacattaggcatcaaccacaacatataatcaaataatcatgtaaatttcaggttgaatctcatacctgtgagaagaagagaacgtggcacaagatttcatatccaaggatggatcagaaaggtctaattcaaatatctcaagagaagcactggtactaaatgttgcatccaactgctgagcagatgttcctacagaaaatatattcatgtaactacacacgcaaaaacagactgagaaaaccatagaaaatagaaattaaatgcatgcttttcaattatctcactcatgaatgctacattaacgactgaactctcaccacgtataccactgaacagatgcttacgttactacagcggtaagattccgatgcaaggctcagatatgatgtttgtaagagtcggtagtacaattttttaagtctatagataaaatctctgaaagaacagttccatgcttatagtcacaaatgatataatttcaactctatataaaaatggagcatcaaaactgttgttccttcattcaaattggtattgacttctttacattttatctattgtgcttaataccagaggaataaagatagagcatggtcctgaagtgaggaagacactgtaaatgtaatagaccatgattaacactatgctgtacaagcatatgggaaggccgctgaacttagcagacaggaaggttgcacgtatctcgtcaggaaaggagaggctttctagaggagctgaagcttgacctgaatcttaaaggaaaagtataaataagtcagaagtggaaaagaagaaattaggtgactcatactgtcttctctctgttgaacttacctgtagctaggtaaatgggatgattctgtgcagggctccatgcctgcatggcggtacgatctacttcctttaacttcatcctgctaaagagaacatttcacatagaaatataataggtaagatggaacatttattaacatagaaatatactggacaaaccaatatattaatagtaatgttggaatgccaataaatcaaactggtttaggtatcatttgttgggaaatgtggaccatttgaaagaaacttgttaaattattttgagacaagtatagggctattttgtttacagattatcatccttcagttgaaaaatctgtctggaaggaaatgtgcaaaaacagggatagcatgtggttaattagccttggcatacagtatacttctcagtcaagataagacgggtggcagtgtagcagggctaagggaaggcacagaacaaacaaggtgcattttcctggagcaggactgctcaacaataagagcagtttgacaaactgattttaaataaagcagactaagacagaggtgaatacagcaaacccaaagaattttaaagataaagcagaaaaaaaaatttaaatggtcactccaagctacaatcccatatgctattattttgtatattctatgtgaaagttactttggtagaaaaactcaggagatactgtgctacagtattaaaaatatctttgttggactttcccaggtggtcccatggttaagactccatatttccaatgtagggggtgcaggttcaatccctagtcaggcaactatgatcccacattctgccaaaacaccaccaacagaaacaactttgtgattttacataaatgcattcgcatggcacagtattccactctcagatgtaccctagtttaattagtctcctactgaggaacacctgaattgtttttgaaagggaaagtcgctcaggagtgtctgactctgtgaccccatggaccgtagagtccatggaattttctacaccaggttactggagtgtgtagcctttctcttctccagcagaccttcctgacccaggaattgaaccggggtctcctgcattgcaggcagattcttcaccagctaagccacaaggaaagcccaagaatactggagtgggtagcctatcccttcttcaggggatcctcctgacccaggaatcgaactggggtctcctgcattgcaggcggattctttaccaactgagctattattcttacaaacaatgctgaaataaatggccacacatacatgttacttcacttatggacaaggaaagctatagttttccagaggtaaaactgatgggttaaagaatacaagtaattttaattctgatggatattgccacttgaaatatatcctggtatacagtgtattgaatatgttcaaagtatgtattttttattacttcaaaatcatttattgaaatttttttcttactaactttagataccacctttatcatgtaccaacttcctatatttatttctagatttaatatttaggtttatattcctgtacatatcaggatacaggctaagtttacatttcagtattcatttacatttattctgtgattaccattccttatgcccgtgtatttacatgctaggcatgtcactgctttaaatactgaggctttacataggcatgatttcaataatccccacccattttccatgctattttttgttttttaactacataagcaatcagaaaatttttagtctaattccagaaaaaaagagcatgttagtattatttattgaacctgtaccaaattaataaattaatttatggtgaactgacagaatggtgaatcttcctatcaagaacatgtctttagagttaagccgtcttttttatttttcagtattgtttgaaattttttgacatgctgggtttgcttactcctaagtatttcaccttttggtgcatttgtaaacgtggctttttttccttccactattatgtctatgatctcactgttaaatgaaggctaatgatttcgctacattaatttttaatcctgctttcttactgaattctctttctggagtagtgtttcagtagattctggtgggttttccacatatatattcacaccatgtgccaacagagccaatctccccatttcacattgtcactcctctgatatctttctcttgtgtgagctagccaggaccaacagtatcatactcacagcagtgatgacagcgctatttcttgtcttgccctgttctgcagtgggaaagcctactgtatcaccaataggcatggttttggaatttgagatatatatatacatatatttgtacagataagtgtgtgtccacacaaacttacatctgtacaagtaaataaatatacatatgtatgcaaacatgtatgtggaaatagccactgattactatcttactgaatgctattcataaagactgggtgttaaattttgttgaatgttttttcattaggtaattggagatgaccatatgatttttctccctcggtttactaacaaaacaaagcacgaacagatttcctaacactgaatcatcttttcataccatgagtaaacttctcttgtccatgattctactacagagctcctagattttgtttaaaaggagtttcattcctagagtcctaaatgagatttaattgatagttttcctcttttgtacattctttgtcaggttttggtatcaatgttatacttgttcataacaaatgtgggaggttttcttcttttcccatgctctggaacactttcaataacaacactgaaattactatttctttaaggatttaccagaattctcctatgagatatctgggtctggtgttttgaagggaagataagtggtaattttctctgtttcttctatgcatattgatctatttgaagtttctttatccaaggtcatttttgtaaattatattttcctatgatattcctctattgtactcttttttacaatcttctatttgtttagactcaaacatagactcatgcttcttctaatttgtgctgtgtgtggtgattagcccttatgatattcatgttttatcccaccctcctttgaaaaattagcttagctaagtgacttacctgcttcactgagtatttataaagagtcaaattttggatttacttattagtttcattttttaaaagttttcctaactttttagttaaatgcttcacttattcatttttactatttctttaggctttgaattttccctgagcactgatttgttgtatgtttctggtcctatctttgtaactataattttaaataatttccatttaataccattaatccttcatttctttacatagttaattactatgagtactaacagaattagcttatataatcttactgcctctcctgcagtacacagttataatcattagtattatctttctcagtgtttacctttgtactgttaaatacacttatacgtctactaactgatttgtcagctttaaatgatgtcctttgactcctagacattacagattaggcaatccacaaaatttattctacctccaattttcttcctgcttcccagttctctcaattttttagttttatgaccaatttctacatcatcagatatgtaacacgtacattttatcttttcttccttattcccactttggtttcagcctcaggtccatggtagttaaatatactcaatgttctccaacagcactcttgccagtattcttactcatctctggaggatgaagttcatcctctaatagttttcttaagagggccttagactaaaaatatgccctgtgtcttaaagttgtttacatttgaagaacagatgatacaaggaaggcacagaaagattaaataatttgaacacaccagcaagggacagagccaagatctgaactcagaagtgagctccagagtccagcctcttacttgttacaagctcaagtattcaattttaatcataaaaaaattaaaatttaggagaaataatgaatggcaaagaagctacaatgcatgatgaaattaagagaagaagaaatgaattttagaaactaggtgaggtcaggcaaactgggtgaattaggctgaatcacaccacaaagaggcaggacctctggtcctgaacattgacttctggtccttctggtccttcaacctgaacactgactgctacttttgacacctttacacattatttgatctctctgagccccaattcccacacttgtaagatggggataagtgtgactacctcaggagatgttgtgacgttcaaatgaaagaaatgtattttacagaggtccaaacacaatgcctagcacgtaagtcaaaaagcattttaatacactaactactttaaagattattatcgtcatgagactaatcaagaaaactgcacagctagtttcctaagattattgtgaaggaaaaaaggaaaaaacccccacaattttctaagaggtaaaaaagaggcctattttttttctatgaaaggccttctttctcctctcagtcaatagtctttagtaagaagttcaagtcccatctccttcatgaaacctgctctactgatcccatcgacactgatctaaactctttgtatttgcctataccacactttaagcaactcatttatcttggtaaaactttataacatcctcttagtacatactgtttacatatttcctcactgttttatcaacttgtttcatcttgtttggtcatcttgtttcaccaaatcgacaaatactgtcttgttttcaatcaagtcttacaacttttaccctttttgcatctaaaactgttatacacagggtgagatatgcattgcttgattgattctcaatgtctatatttagaggaatacaaaaagactgatgcgctagaaagaccaattttaagtaaaatatttaatttttaaattcttaactgtttaaaggatctttcttatttaaaaagtgggaaagtactgcttgggggaaaaaaaaaggtttcctaaaatgcctttagaataatttctaatattgaaaacaaaatagctacacacacacacacacatatatatatatatttaaaccctgttgaatataattacagtatctccaggaagaaaggtacaagggctacaggaattcaggagcacttagttaatgtgtaacatttactgaaagagagaaactaatttacaagaacataaaagagtgaagagggaattcaaagcatttataaaatctgtttcttggccttagtactcaatgtgccatcagaagcagttccacttaataacctgtactgaacataaggtttaaataccattgttttaaaaaaaaaatcaaatactatactacaacaatggccttgaactacattaagcagtttgaatctaattaaacaaaaatatcataagctacaatcattctcaaaattattaaaaatactatgaaaatacagcttcatcagatacatgtgtatttccttctcttacaattgattatttagttgtaaccagtttccttaaaaatatgaagaagtcttttagattaaaccatgtcaatttcccaagtaagacttgctttaaaaactttctgtagtttttaatgacatatttttatttcagtttattcatctggctgtgctgcgtggcatgtgggattttagttaattgatcaggggatcgatcgaacttgtgtcaccctgcaggggaagcacagattcccaaccactggactgccagggaattctctatgtaatttttttcaatattgtatgtgactagaattcacaccacacagatttatttcattcggaactattttgcacagaacacaatcattgtgaaaatatgaaaagaaaactgtgaggacgatggtttgttcacacatgcccccataagacagtaccaaaaggagagcagttaaggtatggagactggagccaacactgtcagtttaaatcccagttccacgtgtcctagttttgacttctggtaggtaattttatctatgtgtgtcttggctaaccatttggtaaaataactatagtaaaagcatctacaacataggtttgctgtgagaattcacagagaacagtgcctggcacctggtaaataaatgcttgtaaacggcagctaaaaagtcaccatttaataaaatgtttaccccagtgaaatcttcaaaagaatacatctactgaagaaaatttacgatccagaccacaacttttatttattcacccaagtttctctccgcaacaattgtgtgcagtgaaatgaaactttccccctgcattttctaaaagctgattttgtgaagcaacgctaaaatccaacagcactaacctctaaatagctccaacctcacaatggtatcatacatggagcactgaactaaacctcagaaagtaaaaagtcaaagaggtatcagaactggaaactctgactcccaaaccagaaacacaatacctggctgccactgtggctgataaaaattcaccttgtgtgggcaagatacctcattagcatgggcacatttgttccagagaatttatttaatgttactgatggtctaggctcatctcactcagccaaaagcaaatcaaagatgcaactgtgcgctggtcattgaactaaatggtgtcacacttatccgcagtcttaatacaacaaaactttttgagctaaaattaaccctcttttggacgacatcacatggcatatgggatccccagttcccccatcagggattccatccgtgccctctggagtcccaatcactggaccaccagggaagtccctgaaattaatctatttaagaattacgacatttccagaaaaacaatgtaataattaaataatatcattttataagaatctttcattagaactgtatcaacctcatgatattatacagaagatcccgtatgtgtgtctgtgcgggttgccaggaagatgatccagtagctccatcagatccttaaaagagagtggagtgatatatacaatgtcattgctgttctttactcattaagttacgtccaactctttgggaccccacggactgtagcccgccgagctcccctgtccatggaatttcccaggcaagaattctggagtgggttgccctttccttctccaggggatcttcccagcccagggatcgaacctgcatctcctgtattggcaagcagattctctaccactgagccgcctcagaagcccacaggtaatacttcttagccataaaaaggaatgaaataattcctttttatgccatttgcagagacatggatatacctagagactgtcatacagagtgaagttaagtcagaaaaacaaatgcataatatcgcttatatatgggatctagaaaaatggtacggatgaatttatttgaaagcacaaatagagacagagatctagaaaacaagcttacagataccaagggccgggggtggggatggggtggaggaggatgggatgaattgggagactgggattgacatacatgcactcttgatattctggataaaacagattactaaggagaaaggagtacctattgtacaacacaggggactctactcaatgctctgcagtgacctaaatgggaaggaaatccaaaaaggaggggatacaggtacacatataactgattcactttgctgcataatagacattaacacaatgtaaagcaaccatactccaataaaaatttagaaataaatatgtaaatatcaaaagaacatcagaaaacaaaataaaatcacaaatacttctagaaaaaagagagaggaatcccaaaagatgaagaaccattgctctttatagtttacaaatttctttctgttcttactggtttcagaaaataacttgcttatataaaattaagttatataattggaaatccatttcaaatctgacatttcctaaataacctcagatgtgtgtaacataaattcacaacaaaaacacttcaacttatccaaaagttcgtaagggtctacattcccagggctgtaattagggagaaatgagaaaacaggagcactcaagaaccactgagaaaaggtaagtaaactttacctaactctagaacaatcgttatgtacagaaaacataagatagtatgattcaaggacgaagctctaactactgattacacagtctaggttgcccaaaacgacaatcaatttcagtcttctgtgttagaaaaaacagtttcgcgggaaggatttgtaaaagaccatcactgaaacttcagaatgacctgggtaaaattagttccccgaattatgaaaaagtttacaatgcccacaagcccaggcaacattttgatttattttacacctgcccccgtaacttaacctctcattatagtaaatcagtagcaaaaacatacaacactgaacgatacttccttcgagatacaggctgcgaccggcggcgactgcccttaaaataaaacaatcccagttaagtgacagtagcctgtagttaaaacctacgaacctttaaatctggcaacagctcagataataacaaaaaatcccaaactaaagtcaaccaaggtaatgctgatgaggtctgtttccttccctcgcccttggggaccgcgcctctttgtgcaccagggtccgaaggtctcctaacctcagacgccagctacgcgccccggctggacaccctggcgcaagcctctggggcgcttctgctcagcggaggaaacgtcggcggatgcgggccggcgcgatccccgaagcagccgtgacgccaggcgctgtccctccgggcccgaaacgaagacccgggcgcgccgccgccggagaccgggccgcaggctggagaggaccagcggagaccgagaccgggataccgtgtgggcctgggctctccccgaaggccccaggagccgcaaagaggacaggagagcacaagaggacgcacctggcggggacccccggagaccggttcctgcgtgagcgcggcgccagtcggactctcccagcattcgccgccgcccctcctcctggccggggccacctccacgttccgctccaacgtggcagccgcagccccgcccagccggctggccgacgcttccgggagcgacgccctgccccgcccacgccgatacgcggcccgccacggcacttccgggaccggggctggagccgggccccaggccggggttctgtagcgcgtgggagtctgggaggtctcgctacgcgccgcccgtgcacttgtgagttcagaggggcggcgtgcggtggccaggatgatgcgaaaaagaagtcgcggtgggcgtagctgtctggcgggaggccggccccggccagcagaaacgccacgtagcgctggtcctgtgagacgtcagcggcccccgccacgctgccgacgcgaccggccaccgaaaaatcgggctgcaagggccttattacaaggctgttgctgggatatttcactcatttacttggttctacggtattgcttattgagcatatctttaaaaccaaacgatctggtcatacccaaaggctgttgtggacatgcttgatttgttactctaaagaggcatgaatgtgaaaatcgcccagtcatggccgactctttgcgaccccacggacttagcccgccaggcttctctgtccatgggctttcccaggcaagaatactggagtgggttgccatttttttttgtccagatcttcccgaccctggaatcgaaccgtggtctcgtacatcgcaggcggattctttatcagctgagttaccagggaagcccctagaggcacagtggagtgaataaggtactatagttagtaacctgcgatactatttcagatctgttaacatttgtcacactgtaacttgactggtttcgccagagcctgcctgtacatgtgcagttctcttcccaatacagcagtcaacggtcttttctaaacgccttcactggaagtaaagtaaaacatagcaaactcttgtatttaagagtaggcaagtttttgtgttcactatactgttttagcaaaaacataaatgtatgaatggtcttaggcacataccagccaaacaggactgctagagttaagcacttattatttatctgctagacttgccctccacaaagataaacaaaactaatcactctgattctgtatgaattatacttagcatctggcattcttctccccctgcattctcttgtaacatttcaaaaaaggtcacaggttaacttcagggagacatgatctgattactgagttgtgtgatgccagctgtggctgttctgaaattttgcagaagaaaaaaaaagcgggaccttcattgggatagtttttgatgtgctagcctgctgtgttccctctttgcgtgccaaagaaataaagccactatttctcttccatactatttctgttcagcatcagagacaagattttggcatcagttgtaaaaccatttagtagtggtatacacttatggttcagtttaaaaagcaaatatagttagttctgtaaggctgaagtagacctactcaagaggcttacgatagttattaatttcaagttctaaaaagccttccatttttcacttaccattccaaggactagtttacctaaaaaggtgtcaataaaaacccgacttaaaagtcggaccatatttgggggctcccctagtagctcagccagtaaagcatctacctgcaatgcagtagactcagcttcaatccctgggtccgaaagatcccctggagaaggaaatggcaacccaccccagtattcctgcctggagaattccacggacagaggagcctggtggagtcagagttggatactagtgactttctttcattctgttagacaggattttgcctgcaaagtccaaatgactttgtgtaataaatttttatttcaaagccttgatgtagtagcatacaatgtgaaaagtgtgaataataattggttatgataaagcttacagttctagacttgatgcacttatatctgattgaatataaaaactcaccttgttttaaacgcaggcagttctgcctttgactacacaagttgaaatggtgcagtcttaaatctatgggattaacagtaattgttaatatttaacaactattctgtgacttggcaaaacattaaaaaacctctgaggttggttataaatgtaatttataaatttttgtgtaattttgtaacttatagctttaaagtaatatttgtagtaacactacaaacattgggaattccctggcagtcgagttgttaggatttgtagctttcactgctggggttaagatcaattcctggttggggaactaaagtcccagaagccacttggtgcagccaaaaaagaaaaaaaaaaaatcaaacccaacaataatctcccccactaaacaaaaaaccccaaaacaaaccactagagacactgaaagttatgttttctttctttattttaaaaaatgtatcaagtagttttgaaatgtgcttactttctcattataaaacttataatatggagtgagatgccaaggcatcttatctatgccttggcaaactgtcatactctccaagtttgaatcagcttccaaaattttatcttttaacagtcaatgtcatgatacagttctgcaagttccttcaatgtgaagttgttcaacaacatcacttcttttgagacacattcattgtttacaactgctttcctatgtaaaacttcactaagttctgcctcctacacacctagaactgtttcttgagtggcagcagtgtcaacactctcacagtcatctctatcttctaactccatttacatcccatccaaatcctgcagtttttccacggtacagcctctcactactacaaggactgcctgtaattcttggaatcttgagcgcacattccacagtaacatccttatctgagtctgtagcttcactaggtagtttaacattagcttgtgttgactttgagatgaaaccagcctttcctggcagtaaatagatgtccttgtaattaccatttccttcaatgtagcgactaacttcaatgccaaactgactggtttttgttcttgattacactacaaaggagaaggaaatgcctcacttcaaccgtaagtggctttctgttcttggtgaaattgtacactaaaagatgctgaaccaactttaccttgctcttaaaatgtggcttgtactgtagcttcatgtaggtcatggtatcatcctatatttgctttgcagtggacattttcaaagcttccaacactaattttacctgcagtgttaatcattattcatttctttgtagttcagtcatatttattgaccaattccctcttctgattatccattttggtaaaatgttccatgggcttatcactgggagacaaggaggcaacacagttacatgctttgctatctgtgtaactaacagatgttcaatgaccaagactttgaaagaagtgatgtaactgaagccattcttgatgcacaccctttctttgcataatgattctggaataaagagccatagccaagtttatgtgataataattaatattgtgacaaaacttcagctgtgttgttgtgggtcaggtgctgtttaactaccgtgtgaaaagattcacgcatgttgaaatggtgcaaaggacctgtatctaaaaaagaaaaacttgtgttggtaattcacaaaatagtcaacttttaacccaatttagttaactactagccaagccacgttctagatcaaataaaactgaagtttttctgaaatgaatgttaattctaagactctgaaatactcactgaaagaatgtttggagataatgttatatagaattcttcatataaggatttgcagacagtccaaaaacaccctttagagtgtttaaatttattgagaatttagagcccctcccctcctttcagtagtcttaaggactgcaaaagattaaagttctggataacggtactgttgtccagattgtaaaactttacaatcacaagaccatatgtgtataaaattcactgaacagcagccagtactgtgtttacttctggaaaacagtagaatccagcccattaatgtttaaattctgtttttgaatgtgttaatttcatatatcttatcactaagggccataaagtttatatcaaactttaagaaatagaaaataacttagttaaatttgagaaacaccccaagataccatgcctaattcatagcaggttaatctggtattaggtttgagattctcagctctgactacctgcctatctactgttcttgaataaagctcaagtaaaaggatgggcatccaccagcataccaaagaattatttatagaatatccaatagttcaaccaatttaaaccgaagaatatatgacctctaagaatttcagggcctgaaagaattatataattattttttttaaaagatgactatcaaggttaaaagtcctgccaccccccacccacccaacagcctttcctgaatcaaatgaaaattatactatctttgaaatattttttatctttgaaagctgaatgaggaaaaattttaattaaatatccacattatgctcaatacataaatacaaaatccaatgtttttctaaaattactatcttaaaaaaaataagtttataaacttcttaccttatataaatcttcaaattcttgataaatctcacacacggtgttctctaagaaaaacacccttcaattttattcctaaaacgaaaaacatttacaggcaagtcaatgtacaaaaaccacatcttaactatatgcatcatgattttcttttcttcattatgtcctcattcacatacattaatcacaataaatcatgatgtgaacagcagtgggaaagtttaatcactggacatttgtacttattttcaacttgagctctagttttaagtttttattgcttagctcgcttttaaaaatacatataggcacatttctatagttttccgttttcgcatgtagaacagataagacttccaattttactatgactggaaaaaactcataacaaagataatttcaagcatgtcacttactactttgtacaggttcagttcagttgctcagtcgtgtccgactctttgcgaccccataaatcgcagcactgccaggcctccctgtccatcaccaactcccagagttcactcagactcacgtccatcaagtcagtgatgccacccagccatctcatcctctgtcatccccttctcctcctgcccccaatccctgacattccaggttcctatgcaatattgttctttatagcatcagaccttgcttctatcaccagtcacatccacagctgggtattgtttttgctttggctccatcccttcattcttgctggaattatttctccactgatctccagtagcatattgggcacctactgacctggggagttcctctttcagtatcctatcattttgccttttcatactgttcatggggttctcaaggcaagaatattgaagtggtttgccattcccttctccagtggaccacattctgtcaaactctccaccataacccgcctgtcttgggttgccctgcgggcatggcttagtttcactgagttagacaaggctgtggtcctagtgtacaggttagcttatgttaacttggaggtgtcttctcaacattaaccctggtattggaagagtacccatactttcctgacctgcatataggtttctcaagaggcaggtcaggtggtctggtattcccatctctttcagaattttccacagtttattgtgatccacatagtcaaaggctctggcatgttaacaaagcagaaatagatgtttttctggaactctcttgctttttcgatgatctgcaaggagatcgaaccagtctatcctaaaggagaccagtcctgggtgctcattggaaggactgatgctgaggctgaactccaatactctggccacctcatgtgaagggttgactcactggaaaaagactgatgctgggaaagattgagggcaggaggagaaggggacgacagaggatgagatggctggatggcatcaccaactcgatgcatatgggtttgggtgaactcctggagttagtgatggacagggaggcctggcgtgctgcgattcatggggtcgctaagagtcggacacgactgagcgactgaactgaacccataccttaacacatccccaaactggttacgcctcgctctgtgtgtaatgtcttttttatcagacaaggtttccaatgatcaaaaacactaaaagaggaaaagtgggagagtcatctctgctaacaaagaactttcaagcagtgatgatgggaaaagactcaaaagattatgagactccagaactaattagaattctgcctatttagaacattatgcggagaaggcaatggcaccccactccagtactcttgcctggaaaatcccatggacagaggagcctggtaggttccagtccatggggttcccaagagtcggacacgattgagcgacttcactttcactttcatgcactggggaaggaaatggcaacccactccaatgttcttgcctggagaatcccaggacggtggagcctgatgggctgccgtctatggagtcgcacagagttggacaggactgaagtgacttagcagcagcagcagaacattatgactgcttgacaaggtctatgttttactcattaaaagggacagagcccagggcagcggcaagcagcagaaagaaaaggacatattctcaccctttggggaaaaagggcaaactgctctaattctgctgctgcatatttgtatttttaatccatcctatctcaaatatttgcgtaactgcctacaggcaatcagactacattccttgaaatactctaaatagaaatttcaaattttccaagtcattctgcaccccaagcaaaataataaggcaaaggatacacaatttctatctacagtttagtgttactgagtttctctaaccacttccacctaggagcaattaggagaggggaaatgggtccaacaacaataatacttatagtatttaattacgtgggcttccgtctgtggggtcgcacagagtcggacatgactgaagcaacgcagcagaagcagcagtcaggctccaaggtggtctctgatgacccctcccctcttggtagtcacacctttgtatagtgcccacctacaacacactaaggccaacagaacagggaagaagtgatgtcttgtaactttcaagtgaatttaaaaaaaagtattaaaagacaagcttccatcttggcctttctcttagaccagtccctctggggaaagccagctatcacgtggtaagaacactcaggcagcccatggagaggctcacatggtgaaaaagaactaaaaccttcagccaacagccatcagggaatggaggcttgcaaactgaagacagtttggaagctgatgtctgttttctacctcctttccttactgtttgatcagtgtttgttttaaattgccaaatattgagcaatctgttacacagcaataaacactaacacagaaggtcagaagtgaagtgaagtgaaagtcgctcagtcatgtccgactctttgcaaccccatggactatacagtccatggaattctctaggacagaacactagagtgggtagcctttcccttccccaggggatcgtcccaacccagaatggaacccaggtctcccacattgaaggcggattcttaaccaagccacaagggaagtcccagaaggtcataatccatatccaaaaaagtaaaacgtacaacttatgaattagctgaaaatgtctaaaattcatgggcaaggatcagattcagaactgactttatactcagtcaccaataatttcaaaaccccaaggccttctgaagaacaaaaatccccagagaaccaacaggatgaaaaattcagcgagaatatgtcagttactacattttattatagcaagatgacaaataaatgtaaaactagctaataatctgacaaaaagataggtattcaataaggaagataccagtcctagaaggcaaagcctctgtttttgctttcatagttgagaaaaatgtgttaaaaacaaaaaattgtgcacatacaaaacatttagtacaactcaataagcattagctgttactaatttttccccaagtaagcaattaatgagattttataacataaagttagatttcactcaaccctttagaaatatatgttttacttgggcaatcctccccttccactcactgcttttgtaccaggaatacttaatatgctaaaaaaaagaaagatattagactacctcccctgcagttttagtaattctcttccaagacccaggaatctttttccgacatcttcaagcatacaattcctgaaaagagatattttatttcaaattattttttgcactggtcaatgctttctacaaataatatctttaatacagcttacatatcctcattcatgtattcagtaatcacataagttcattatgtgaacagcagtgaaaacatttaatcattggatatgaagctatcaaaggaagcaactgctaactgctaagtcgcttcagtcgtgtccaactctgtgtgaccccacagacggcagcccaccaggctccgaaggaagcaaagatataatcaaatgatgtaattgagaacttcagtgtgaccaggaaaaaaaatgaaaaatagcaacaaaaagtatgtaaagcttattagcaacataaatacaactcaacatcaatgaatccatttataaaggattgcatgcttccctatccagaagcacactaagtatacccacagcagcgaccccctgtggctgtaaagtaacttggttactttcattgagcaggtgtgcatttaagtcagttgttccccaacattgcagtcttctgaaacccatctgtaataaataattagatggatactgtcaagactttgagagccacattctcatgaactaattcagcaggaaagaaaaaaaatcccttctttgtactctgatgctgaactggcagctctagcttaagaaaatgaaaaatgagtgcctgcacctggactcacttaggagcagcacccacctccgtgcccagctctcagcaggttagattatccctgaacccatcttaacagcagccgtttcgcccagggctctacttccatcagaaatgtccaacacccacaagcattgctcttttagtactccataatggcaacttttaagtctccatttaaagttacctttaatgggttgaaagagcataagcgtacttcgctggtaaccaatactttttcagttcagttcagtcgctcagtcgtgtccgactctttgcgaccccatgaaccgcagcactgccaggcctccctgtatccaactcctggagtctactcaaactcatgtccatcaagtcagtgatgccatccagccatctcatcctctgtcgtccccttctcctcctgcccccaatccctcccagcatcagagtcttttccaatgagtcaactcttcgcatgaggtggccaaagtacaggagtttcagctttagcatcagtccttccaatgaacacccaggactgatctcctttaggatggactggttggacctccttgcagttcaagggattctcaagtcttctccaacaccacagttcaattgcatcaattctttggcgctctgctttcttcacagtccaactttcacatccatacatgaccactggaaaaaccatagccttgaccggacggatctttgttgggaaagtaatgtctctgctttttaatatgctatctaggttggtcataactttccttccaaggactaaactgaatactacataagcatattataatagaaagcaactgtgaacaataccttgagataaatcttttcagcgaaaatctggattaagtaacaagggagaaagaacaaccttgcttggaaatgttgtactcattcttgcagctagagacagaaataaaaaagttacgaacatttgttttctttaatgagcctccaacgttaagcaggaaagatgctacataacatactaaggacctcttcaaacatacaaaatagaaagtacgcctcaccttggctccattttgtttcttctgtaaaaacttaagtctcataccgtaaacataaagagcttaaaaaaagacatcgttctaagatcttctcactcctgaaaactatccacgatgccccacatcccaagcaaaaccattttactgccctctctcctgcccctcctagtactctattgaagagtccctactaggccgtgcgcttccccccaaacccccagaacctttttaccttatctccttcgtaatctccattgaggcaaaggatcttgtaggaaagagctcgttgaattaaaaaccgacttatcttggtattaaattctcattaaattctgaggccacatacctcctctaccaatagctccgacattatctccgcatcagataactccaaaataaaatgcaagaaaatgacatgcctcccattaaataatttatttgggttctaattttgccttcaatatttctagggcgccacgttcatcctttcctagccctcccgtcactttcagagctcgcaccttgagacccatcggcatgcctctggattcgcctcaacttttgcctgcctctcccccttcgcattctctggccgagcctcggaataagcgcgatggccctagatttcaccaggccggacgaaaaacagaccattccagcgaaatacacttatcaccctccaacgaggagcgaggggaggcccagagattgacttaataccccccggcctttccgattggctgctgcgacgtgac

SEQ ID NO: 141 - DNA, 28200 bp, Hippotragus equinus
  source 1..28200: mol_type = genomic DNA
caacagttaactatatcgtgctagttataggtataataaagagtatctaacatttgctgggtgcttattaagtgcagatcactgtccttggtaacttgtatccatcccatttaacccttgaaggtagctaccataattaaccccattttacacactagtaaccgggggtgcaacatcacacagctgattagtgagtaaagcaagaacaggcatgtaggtccctggagtctggctgcagaagccaggctctaaccactaggctgtaaaacactaactcatttttttgttgttaaaggggtatgggggggttgggggtggggagtgatcagtattttaactagttggcctcctaatagagttaggagaatcaaaatgaaagctagagaaaggaagaaaacaagactctgtaggccgaacagaggccataacccattcttttgcttatcttcaaacttaagagctaaagcagacacataagagtttttaatttgccagatactcttttaatgagaattataaaagaccaaaaacatttttttgcaaactgctttttaaacaaatgatttgcttttaattacaaatactgtgtgagacgatgccttcttttgcaaaaccaataaacacaagaacaaattttaaacatatgtgatttgtccaagatatgtgggggggggcaagggggagcctgatttttttttccccagtatttaaaaaaaaaaaatcagtactccctaaaccttacaaagaataagtttgaaggtatgactcaactggagaagagagggagatcattttatagctgctttaactagtttctgataattcttctgatgttatccttcctgctttaactagtttctgacaattcttctgatgttatgtttcctttctgaaactcatatcttcacaaaacagttgaatttaaaatatttctaatgaactgattaatggggaaaagaaaatatgtattgaacacatgtataaattttaccatcaacaattatgcatatcaaagacactaactttaaaaggtacaaaaaaaaaagtgaggaaaaacctgaattacagaaaagaaagtcaaatttatttaatgaaaaactagaattaataaaaattagcaaatacacacagaaaaaaatatacacacacagcagcactatgtattgactcacataggggaaaagcagtggtccaagaccactcaacatggcttgtcagttaaaggaaaaaaaaatccaaacacactcacacgcgcgcgcacacacacacacacgcacaggcacacaaaaaaacaagaacccagtatttttcaacggtacactcaatctacaacaaacacaaattcagaattattttacaatgcttcctttcttaatacaaaagatgcccatcttgggtgtatatatatatatatttatttttcagtggtttactgttgacttatttttaaatatattagtgttattacatgcaactgtttcctgtatttaacagcctttccttttatttaccttcatgtgtctagcttccacctaccacaagtttttggttggtaggcagacaggtgccttattctctgtgaaatcaaatgcaatggttttaaacactggccagaaaatgtctgattgccatttcaacacatggaaatagttacattgatgcctaaattgccattttctgcaaagagctgtgcaatgctggtgtcaaagactaggcagtcactattcataatggctgttgcaattccctcatgaatagatcgaggagtggcttcccaagtcaatcgtcgcctatgaccatttagctcaagtcgataagcaaaattttcagcttgcttgcgtgttcctatcagctgtacaattgcaaagaattgctggtgaccatcatatttttcctgcttctccaagaccaacatgaagtgaaagccgaaacaggactgcatcatcacccagtcaacagcaccaggaagattaatgtctgtggcaaggaaaactatgtcctctccctgcagggttgtgatggacttatgctgatgcatcagatgcggcatgacagcatccagagagccttgccatttacaggaagcaccagggcacgggcaggaataaggcctaaactcacagagctcttcgtggtctgctttttctgtgtgtggcagagttatttcacatccagaagaggcgtatttacaagggaaaagtactgaattggccactttctccatagccaagttgcgaatggatcccaacgggccccggcaagttggacaacatgtgagctttgggcgacagttgctgcaaaccagatggccactctggcactggagaataggtggcagcacatagtcgaagcagaccggacactcaaagaggctcgccaggtcattgttggaggcagttgtgcccgtcaaggcaggcaccctctgggacggcgcacactttgaggttccagtaggtaatgctgttgcagtctgacggctcatttctgtaataaaaaacacaaataaaagtataaggaggcaggaaaaattaattataactataacatgttttatataagtaacagttgcttgcctaaaatacttaagtttagtgcaaaatttgctgtaagcaaaataaagaaaaacaaacagggtttaaaacaacatagattacatgaaatatgtgcactgtacattggataaaatctgttttcacaatgttccagagcacattccctttttctaaatgtttaaaaaatcatccttgaatggactacatggaataaatgctaaaatagaaacttggatcctaaacaactaaggaacactgtataaacagtttaagttcaatgaaatcagttttgactggaatttcccctgcctgtgttcaactgccctgctcattctatttcttccccattcttaagtcagctgttgacagcctcagtgagttatacatgatccaaaggatcaccagggtactgacttttgattactctttctaagggtgaatgttatctgctcaagagatctatctggggaagggaaggtctcctgccagcccatcatccatctccatggaatgttaacaccagctagatcttcatcttatttcctacccatctgtgacccccttcaaaagtgaggaagtatataggtgaaatagagggccaccctctaaaagatatgagtctggtattcagaagtaaatcattctgttctacttccattctacaatattaatcaggtataatctgcaaagaggaaggaaagttaggaaaagaataaacagtatcagagagactcacacaacattaggggtgagggacagagtcaacaggtaaagaattccttatattctattatagagttcaccactgttgctgaagcattcatcagcacagtactaaacattatttaagaaataaatgccatctggaagaaatgatcaacagcgttaactaacctgtcaagctgagttaaagataaaacaagcaccttttcccaggatatagtgcgctgctttcttggggatgacaaaaaatcagtccattaatgtcctaagagtatatactcaataaccacaagccatatctctacaaaatcaaaatttaacaactcctaaaagttaatgtttccttaaatataattgttattctgttagaatttaacattgcaaaaataatgctagttatcaatgagaccacataaatgcaatttgggttctattactcatagacagggcgtcccacgtggctcagtggtgaagaatccaccggccaaggcagaagacacagtatcgatccctgggtccaaaagatcccctggaggaggaaatggcaactcactccagtattcttacctgggaaattcccatcgaccaaggagcctggtgggctacagtccacggagtcacaaagagtcagaccccatgcactgatcgactgagcacaagcacacactcacagattactcaaggacagacaccttaaatggggattgagagtgaaccctctcccccaggaaacctcaaaacaggtcaattccactgtcactaaaggaatattctagagttcatggggaaacaaaattatcacaagaattctatcataacatggctcatcgcatagatttaagacaacaggaatcaactctcatcactgaagctctgtataaccaaagtgttcaagcccaacaaaaatactataaaggaactttcatgaaatccagtttacttctgagattttttctgcatatgatgatccatgcattttattttaggtcactagtaaaacaatggcttagcattgccgaagtgtcctgtatgtatgcttatttcatggtccattttatgcagctcatttaagagagcaacataataactgggaagtaattccctgggcacaaaatctaagctcattcctttcaaatcactaaaccaaaaccagctggtcactaaactcagtttgtattcaacataatataactactaagcaagaaaaatattactgtttaattttgtgacctagaaaaagttataattttatcaatagtccagactcacaatatacattattattttcccaaacatacaaagcacaacttaaaattcctattcaaactgtgaaaacaagcaaaatatggcttcaatttctggtgaatataagtattacaggacagtagctgctaaaacttcccaaagttcggaaggcggaactcagtccatcttacacagaaaaataatccaaacagagcacagcagccgtgcagtaggaaccaaggactgaagtgtctggacagctctgcagcagtcatgacataacctgaagtttggtttaaactgagaaaagcacagctgatcaaaagaacatcactgccagctcaattttgttgcagcaattccctggtccgtttcagaggctcaaaacaactttcccattccacagtttaagcaacacagtctcttaatagcagtaccttttctcttccttgtcccagatgctggtaaacaagtgagcaagacgcctctccaggagtacagaaaaggtaagggagacttcccggtcataagtcagagagctcatagcctttcccccagaagcaaagacaacttgcaacagagggctctcctgtataccttctgttactaaacatgtcccgggtctagttttcaaaagaaggcacatgccctactccatacactccattcactcctcagaagcactggctactgaagaagagaactgatgccccctcctgttccaagaggagtcgaccacacctcccaaggagctgaaattcgcctgcgtctccaaaaatgggagccattgctgagctgtcctctgctgggccctaaaccttcgtctgtctcggaagtctgtcttccccaaattcatcggctaggctcctgccagctcggtgaagaacagggcagaagggtacgtagaggcgactggtcgactacgtgcgctctcggtgccagctcaagctactactgcaggatccggcccgcaggaggaaagcctgggccaacgcagtgccggggggccgcaggctctctctgcacagggcggcggctgccgcggctggcgagaggcggggcggcgtgcgggggcggggcttaaggctccgccccactccgtctggggcagctcccaagcggctcctgggcaaggagcgtgcaactcccacccaggcacccagccgagtaaaaccccacgatcctcactcccaggggatactgcgcaagccaccagcttactaaaggctgaaacactccatttctgtaggcccaaacagtcggatatcggcaattttgcatggtttcaatccaaaaggctacacagaatatatgcaaaatacgcgaccagacaagcatctctgcactatactctgccagttaaccctgcggacgctagatttttacgaagtaaacgcattctccgtacttcgttcaataactatttaacgggcgttaactaccttatctccacaactgtaactcacttctccacaactgtaactcacttctccatttttaccgctgtcagcactttaaactccttctcccttcgagaagattttgtagtgagagtagtaagcacacatcaccatattaaactcctgctttaacctccaaatttagattttattctcttcccactctaggaaaaccatcttaaacggcctcattaaacagagtagcttgttttgtttttacataagcattacccttgccccaataaagtccagggcctccaatctgcattgcgtcagctcaggcattcagaggtttaacctgtcattacatcatgcttagtgcagcctttaaaggctgcaacactgcaagacctggtgtggggtgtgaaccctgtgctctaaattggccattttcagcataaaattttaactcttgatcacttccccaccctattagtagtgtgttcaatcacctcaatgtcattttggtattaagctacagaaaacatctttaggaatagaaatataactgaaaatagtctggtcactgaaaaatataaattacaataatctatgttttaattttctaatacatattcattctagataggtctcaggtttctagaccaggacacttcaaatgttttagagcagaaaaacttcagacagatttaggacagagtccaaatgtgtaaaaacaagtaaaagggatgacatttctcaagcaaaaaaatgttttcccaaacttccaaagaacctatacaaaaagaacctatacacaaagaacccatacccagatccttacagcaccatctaaaaatcattaatctgtggacaaccctctgaacaagtgagtcaggacagtaacaatggaagtgttctggagtcatctgcacttgaattcaaactcagccttcgccacctgctcagctgtaaaactgggacaatatttctagccttgcattgcttttgtccagattaaggaagatgggtaagttatatatatcataggtggcacaaattccaaaatatgtaagtgctcacttacagaattccaaaagttaactttaacttgtctgacctaaagtcatcaattagagacctagaacttgtgggttccagatgtatactctaaaagatgcctttagctttaataaggttatcaaacatgtctaccaaagagcaattaccattttaactaatttttagcacaatatagtagaatttctcgactaggtagaacatttatttaaactggttttatgagataaatttttacaaaaactacattacactaagacaagcccacagaatccaaagttagcaaaattccaaaatttatcaagagtccactattacttaccctttctaaaataaagcttacatctcaggccccgtttggtataaagtttagactttaacttaaataaaaacattttagaatcagcctttaatgttgccttagtaactttagaacatttaaccattgctatgccacattaacaaacttaccactgaagtaaacagattcaaacttttagtctcaatttcatatgggaacgtttgtttcctattataaattataaacaactaatgaacaatttctctgattaattgtaaccttgtgccgggcattttaatgaatatacaacaatgctgtgcttttcattttcttgcagtttttacaaatgttaccatgatgtgcaaataatgacccccctcaaagatgcccaccacaaaattaaaactatggcaagtctccttaaaaattcaacagcttaaaacgctaagttaaaaatcaaacttcattataacacaataatgcaagcgggaaaaaaataatcaagcaatctatttttagtttccagaactgtaccttactaatggtaattttaaaaaattgtgcacagtattttcctaaaagctcttttcctgaagataattcagaaaatattgtagctacaaaataagatttatatttccaataaaagtaatgatctgaagtgggggaagtccaggacaaaagacctgatagaagatgtaaaagcatcggtctgaacaaaggtgatgacagtaaatggagaggaaaatgcaaaccataacttaaatgtataaagcatatttgttttttactccctaaatcactgtatttgaggcttctatacttagtaaaaaaaacaaaaacaaaaacaaaaaatacttaaccagaacccattaggcactatgctaaataccaaactatggtaagagatgaaatgcaaagtagaaatgagatgcctgtgagatatctaagagatggaactcttaacctctgctgatgggaatgcaaaataagttatcaccatatccttgtcattgcagaaagtcccattggacagcatgattctatatcctaattttacttcactattttccttattatttttatttcacagtgaatctaacctcaaaatgaaattaacctcaaaaatgaaaccataaacatctcccaaaacaaggcaggtcaaacctcaatcttaacaatctgaagctcttgcataattgcacaagctcagaatttcagtcataccatttacccctaagaattacataaatcctgctgtcttctgataagtaactacagagatcaaacatctaacctcacttttattcttgttcctctgcaagtaactttcctaccctaacaggtggcttctaagactcttatctttggaagaaattttcatcagaacatctagatatatgtcatcagcacaagccaacagcaagtattttccatctcaaggcaaatctttcacctttgtggaccttgcctctaattgttcttttttaactcttaccattactcggttcttttcttcatgtaaggctgatactgactctcctgaatctatcttcaaaagttaatatattttttctcattattcctatccttgctttgtactgcattctaagagaactcaagttctaattcataaattcggttttgctaaggttaccaatctcctgatatgctaaagcatttaattatatagataccctgaaccaccaacaagggagcagagtatgatggaaagaacggctgcttccctttccttcccctgaagttggaatggccacataaattcagattgtactgctcttgtacttccttaacctctctattaaagtttccatgtttaattttcatgtccctcattgaagcgtcactgttggttagtggttttgttctcactgctataacctaaatagttccagggtcagcaaactaaataaataaggaggcagagaagggacttttcttccattctcactaaaacagatcccccagacgttcattaacaagcatatgtatgtaccaggcattgtcctcaatgagcttccaaggtaagcatttatcccccatattacagaaaagaaaatggatctcaaaataaatttcagatcacagagctagtttaaaaaagaaaaaaagggagctgaagagctatgtgactaaggaagactcagaaggagtggtaaatggcatcctaggccaacagacattataaaaaaattttagacttggaaaagatcttaaccaactctctcattttcagaagagaaaaatgacacagaacttgctaaatgtcatataaagtaggtcaatgttctaatctgggcaatgttataatttcctagatccttgtaaagcaaatattctttggacattttctaattcaacttgaaaaattaaccttttctgaatttaagtttagtaagattcaaccatcttttgctttccctcccaacacaagaaggatccctaatgtagccaggaaagagtaaataaaaaaaagatgggagatgagtaagagtcagcaccctagaggggcctttcctaaaggccagatcactcttcgtactgtcttcatattatctcttgccatatgaaattcacttgctaaataatttcttactacttattatctgtcttctgtccttttccctctcctcctcaataccagctttttgctgaaaacagcaattctcaaacattttcgatttcaggaaccctttgtaccagtaattggcaaactacagctgcaggccacttgcctgtttttgtaagtagttttactggaatatagttaagcacattcacttatatccaggactgtttccaagggtggagatgaaaagaccctatgtatgactcctacggttttccctggtggcttagtcggtaaagaatctgcctgcaatgtgggagacccaggttcaatccctgggtcaggaagatcccctggagaaagaaatggcaacacacgccactattcttgcctggaaaaatcccatggacagaggagcctggcaggctactctctgcggtcacaaagagtccttggggtcactaagagacatgattgagcgactaacacttttcactttcatgactcctaaagccctttaagcctatctggccatataagaaaacatttgtctatactgttttaaagtttttaaaaattgaggatcccaaaagagcattttgtcagtgtggtttatatgtattaatttttacaatattagacattcaagtcaagaactttaaatatgtgttaaaattaccatcacattttttatataacatgtaaaaatctacatgttaaatgtttatggaaaatatcttccataatagggagaagagcatctatgttttatgtattttgcaaatcttttaaatatgatacagtaagaaaaacaaaagttggatatttaatatctgctcagctgcaatgcaggagaccctggtttgattcttgggtagggaagatcctctggagaagggataggctgcccactccagtgttcttgggcttcccttgaggctcagctggtaaagaatccacctgcaatgcgggagacctgggttcaatccctgggttgggaagattcctggagaagggaaaagctacccactctagtattctggcctggagaatttcatggactgtaaagtccatggggtcacaaagactgggacaccactgagcaactttcactttcactttatgccattaatctgtgaagataccatatgtcatgaagcctctgggaacctcattttactttcatgtctcattattatgaaaaacagctttgacactcaaagggtcttaagaactcccagcttccctgaccattaacttctcattcggaagctctgcagaatataagcttcatcagaacagactttgtttattgtgctctctcttctatctccagcacctaggacagtacccagtccagaccaggtactcaaatatttctgaaagaacaaataaatcaagtacaacagtatgaaggactagcatgtgtataaacagacctcactcatccctgataactcctcggtaaaatatatctgttgcttgatataaccttaaagagattcacaaaggtgaatgaatctcaattcacaattgagacttacaatttactttaaataacagtattttacaacaacaccatgcttatctttgacaaaggagcaaaaggcaacaacacaatgaaggaaagagaagacttcaacaaatggtgttggaacagctgggtatccacaggcaaaacaaaagaagaaatctagacacaaatctaacacctttcacaaactaacttgaatcacaggcctagtaaaacagaaaactataaaaatcctagaagataacacatgagaaaatatggaagacttgggtttggcaatgacttttcagaaaaatcaaaggcatgaacccagaaagattcatcagctggacttaaaagcaaaaatgtctgctctgtgatatgatcaagagaatgagaggacaaaccacagactgggagaaaatgtttgcaaaagacatatctgataaaggactgtcatccaaaatattgcacagaactcaacaagaaaatgaatacgccaattaaatggcatgccacaaccactgaagcccctgggcctagagcccaagctctgcaacgaaagaagccaccacagtgagaagcccatgcaaagaccagccaccactcggcccaactagacaaagcccacacaaagcaatgaaaatccagcacagccaaaaatgaattaaaagggaaaaaagtgggcaaaagactgtaacagacacctcatcagatatacggatagcaaaggagcatatgaaaaggtgctccacatcatttgtcagcagggaaatgcaaattagaacacaaataaaacactaccacacaccgtttagaatggcaaaatccaggacactgaaaacaccaaatgctgatgggcatgcggagcagcattcattgctggcgggaatgcagaactgtacagccacttggaaggcagtttagcagtttattcaaaactacacagataccgtgagattcagcaatcaggatctccaaaatttacccaaagtagttgacaacttatgtccacacaaaaacctgcacacagatgtttatagcagctttattcataattcccaagatgcggcagcaactaagatgtctttctatagtgaacagataaactgtggtacattcatacaatggaatataattcagaaattttagaaaatgagctatcaagccacaaaaagatatgaaggaaccctaaatatgtactgcaagtgaaaaaagccaatctgaaaaggctacatgttgtatgattccaactatatgacatgctggaaaaggcaaaggtatggaggcagtaaaaaaaatcagtatttgccagagactgggtgagaggggacgatgggcagatcacaaagcattctgagggcagtgaaatgaccctgtatgctatagctgtggctacatttgccaaaactcatagagcactaagttgtttctttagccactgagtcgtgtccaactcttttgtgactccatgaactagacagaccaccaggctcctctgtccatgggatttccgaggcaagaatactggagtgggttgccgtttcctcctccaggggatcttcccaacccagggcctgcactcgagtttcctgcactgccaggcggattctttaccactgagtcataagggaagcccacagcactaagagtgaaccattaataatgggctttgcgtcaaaccagacaccacaggtcgcaaggaagacccgcatactgccatgaagatcaaagatctcacatgttgcaactaagacccagcacagccaaataaatttttaaaaatattaaaaaaacaaacacagacttctggacattaactaagatcaagtatatggaaacatttggtatattactaacaacacttgcgacaaatcaccaaattaaaaagacccagattacccaagattttactgaaaactgttgtttcaacctattgtattcattttcataacctcagcctgggaccatgtctgaaatgtgataaagacaacaaagtctgctatgatagaaacttccaactgaccacctaccaacctgtaaagcatcatgtcaggagcttcatacagtctatactaataaaggctgtatctccattttgcagatgaggaaactgaagatcagaaaaataagtagtaataagaacagagccagactgctttgtccctgaatcttattttctgtcaaataaccctaagaaaagtatgtataattttctcacttttacacagaatattacaacttcacatccaactaatcttcaatattcataaaaactgaccaaaaaaaaaaaaaatccctaaattctttaaattacacctgtagtcatagcaagtagttgtttttgaattttttgtattaaagtggaataacctaacagtcattaagcaattagacattaaatcaaaccaaagaatcaagaagagaagaggagaaaaataagagaaaaagaagcagggtacttctgtggcagtccagtggttaagactctgagcttccaccacaaggatctcaggccagcccctggtcaggaaactaagactgaactaagattccacatgctgcacagcaaaaataaaagaagcaggaagagattaaataggctctcaacctttttaagtcacaccacatatcactaaagagaattttggggaactcacttgaaattattgaaaccataccagtcataattacaacacaatcacttctgcaatatcaccaagactcacagtgtctagataaaagcagccaaactctcatcatttagttacgtaagtttgaatacaactgtttactaatctgattgggctttatattctctcaggatgtaaaactgtcacacattccaggagatctttgctcttttgctccatcttgatgttaaactatgttttcaaaattcttccctgtatcttgtacccagttttacactttaacatacaacccatccaccttcactttcttcttgacaagtaatggtaggtaaatacacagagaacaaaaattttaaagcagatcaacgctggcagtaacctacaaagagttggtgatactaagctaaacagaaaagaacacacagcttgagagacaaagaaattaaatgagataaaaggtcttatctgaagagtcttaatacattacatgattgacagttctttactacatttatagaataatggaatatataggggaaaatcccgtattaaaaaattcatggagccttattcaaactaaattatactcctctgaagtagttaaagaagctttcctgatggctcagatggtaagaatccgctgcaatgtgggacacctgggtttgagccctaggtcaggaagatgctacccactccagtattctttcctggagacaaggagggacagaggagcccagcgagctcacataagcatcccatctcaaactctagccaaatcattttagttactttgaattaacttagactctaaatttcatcaaactaagattccattctctgggcaggtaccacatttctctacaaaaacttttctgttttattctcttgggttattttaaaaacagcgttagcacagtctcaatcatctgaatccccctgctactcatgtaagtgaatgctcctgtccacagttacagtcacactggtcaaaagctggtactaacagtactctagttacgggaagttaaagagaaaagtagagggggacctaatccataagtgatgcacttgtgtgaagtgaagcccagatgacaccatggttttcaccgaagcactaatacactggtaagaaaacgcatcgtgtggtgaccacacatacgggataactttggtgtgctcaactcacgaagaacctgcagcgtaagtcaattccataagtcatgttgtttcaagactgcaattttgcaggtagtattcgatagtttcataaattagtgtaatttgaagtttactggctttgcagttttgtttttatttaatttgcaagttttgaactgccaccaacatcagacagagctgagcagatccctggctcctgctgggtggactgtcaccgactctacacactctcggttttcctgcctcactaggtgctcctcagtttcctttattgattcctgctcttctccccaaactcttgatattagaagttgtccatggtccacttttcttcactctggtaatctcattcactcttgtgtctttaaaatttcactgatattgtcgtggacctcaacatttttatgtccagattagaaaacaaaaaaaacccctcccagatttgtctttaactacggatgtgtacacccagctgtctcctagacattcccagagcttgcgtgcacagccactcggtcatgtccaactcttcgcaaccacacagactgtagcctgccaggctcctcagtccatgggattctccaggcatgagtcctggagtgggttgccattccctcctgcaggggatctttccaacccagggactgaacctgggtctcctgcattccaggtggattctttaccatctgagccaccagggaagctccagacatttctacaggagggtggtcaaaactgaattccttatcttctcccagaatactcaaccaatagccttcctctcacttcatggaaacttcatccttccagatactcattccaaaagtcttgaagtcatccttgattcttctctacatatcacatgtgttaccaccagaagtcttgtacctccctgagaaatgaatccagaatccaaccactcctcatcacctctactaccactgtatcattatctttcaactggattattgcaatacccttctaaccagtcatcctgcttccatcgttgtctcccaccccacccaccaattcagagcacggcaataagaaagaaaatctattaaaatctcccatatccaggtaaaagataaatcctacaacagtctacaagaccctgcacaatgctgacatgtccccattactgtctgacttcatttcccacctcctccttcctcactggctgactggcatccttgttccctgagggtaggttgctcctttgggtctctgccttagaatacttttctccgagatatccacaagactctcacctccttctaatctttgcttgtatacttccttctcaatgagggctatccagtctcctctatttaaataaaacagtgaccacactctgcccactgaccccttctcctaatccttgctcattcactgttgtcaatctttgcctctcctcctcttccttccccctcctccatttctactctattgttgtccataaaatgtactaccatctattaggctatacgatttacttatttgttatggttgttggcaatatggttgttgttgtaacccctcctccaccacctggaaaatgggaatttgtctggttcaatgatgtgtcccaaacacttccacagtgcctgacacatagtggaggctcaataaatatgttagctgaataaataaattagaaagcagaagagctttggacttctgagctgctgctgctaagtcgcttcagtcgtgtccgactctgtgcgaccccatagacagcagcccaccaggctccaccatccctgggattctccaggcaagaacactggagtggattgccatttccttctccaatgcatgaaagtgaaaagtgaaagtgaagtcgctcagtcatgcccgactcttggtgaccccatggactgcagcccaccaggctcctccatccatgggattttccaggcaaaagtactggagtgggttatccaaaggtagatgtaatagagcaatacttgttaaaatccacaagaaaatgattaaacacagagaaaacagagcagaaaggacaagtattaactacaaggaaaattatacaaataggtccaagaaaaagtaaccatttaccatatggctcaaattgtaacttttacagtcataataatgcaaacacaaaattacgctgttactaaattaggatagtataggaatggtaagggtctgtacatgtgacaagggcaggaaagacagttagacacacaacaggagtaaggcctaaaactgaaatcctgaagtaacaacataagcatgtaatctagagacaatgatggtaaataaaatataatcacttcaaagaggttaaagtagttgcctctagaaaaagacatctggagagaaatatggcagatagtttttcttaaaaaaaaaaaaaaaaagcctagtggaatatttcattttggattattttgcatgtgaaactctagactaaaagaagttcaaaaacttgatatgaattgtcacaaactgcatgcattacttaagacattacaaatataaatttgttttcaaagatttgattccaagtattggctaagatctgcggaaacatactttccctacactgttggaatgtccacgatgaaggtttctaagaatatttggcagtttgtatactctctgatccagtagtttttctttcaagagtctatcttatgacttacacattggcaaaggtgtgtatatatatggatgcctacagcaaccctatttgtaagagcaaataaactgaaaagtgttctagatgaagaaagtgactaaatgatgatccatacaacagaatagtatgctgccttttttttcttttaaataaacagactcatacctactaacatataagaatcaaattgtttaaacaggtagagggaaaaaaagcccacagaatatactacaatcccatttatgttagaagagaaaaaagagatagctgtctttttatatatgtacgcatgtacatacataccatgtaatgggacagaaaactagaagggcatccaaattgccaaatgtggtttaaagacttatggtaaggaattagaaaggggggaaaggaggtcaaattcagaaccagaaatcacaaagactagagttggcaccactgaactacaaacacatacacaaaatagccagatggaagaatatacagactacagagtatacacacaaatttcaccatctggaattacgcagtttagggaagcccctcaaacatgtatagttactgacaagtagtaatcatttaaagggaaagtatctacaacgattaagtcagatcaaagaaactgactttaaaatgtctatcttaaaagaatgtgtaacacacatagactagaaactacaccaaaatgtccataatggttacacttttcaattaccacattaggaatgatcatgaggaaggtgggggttgcatttctgtatgtatttctcaaatgctccataaaacatatgtattactttggggatttaaatttagtgcctattttgtgtccccacacttttctgctaacgaactgctagtgatttcacacaaacattaagagatcaagagttgattttgcctactgctttctttttttcttaaaatgcctcaaatagatgaatacttacttatagggaaaaattactttaaaaacagcctcttcacatttttaacaccctacatatttcaaatacatgtacatattttagtttatataaaaaaaacttaaacttagcacgtgacaaaatttatctgatcaccactccaagcaaaatcaaaagaatgtctgtagaaattaactcagaaactatctgtattaacaaaatatccaaagctgtccccaagaaagctaaatcagggaccctgacaaaacaaaacaaaaaaaactacaattcaactttagctgagctcaaaagagctaaaaggtaaaacacaaaggcaggaaaaagcaagtttttaacaattagattatttcatcaaatcaagaactgaagtacaaacgttagtgtacaacacacttaattttgctgtatcaaccattactaggctaagcctgtcaattatgacaataacaagtacaatacttcctataaaattcaagactggcattaaattcttctcattttctaagaaaatatttctcactggtagtaccagctttataaatatagattcgttctccagagatttttcctctatttctttttctactctcacatgctcccaaatcccctgctattcaaaataagcaaaaacaaaagccacaagtaagttcaacatgactgggcaacctcaaacttaaaagatctttgccaatatcattttggtcactgtggttcaaacctggagaataaattgaaccctaatgaactgttttacctgttatcttttagcctagagttctggaagacttactcctcctccccacaaaaatcaaaataaaagtgatgggatacatgggagctggtcacaatagtgtgcaaaatgcgttaagttgtatccttaaaatcttgagcacacttctgtatgtagttatcccatatgtcttcaaaaaagtttacattgaggggaaaagaagtaatactccaggtattctacaatctcctgagaacagtaagcatcaggtgtcatagctggtgacatatcacagaattttctctcccagcctcggctcagtttctcactctctactatgccttcaaccagctgtagtacagtagtcgctaactatgaacactcaactgatggcttcactcatacttcctttagaaaatacaacagaagccatcaaatgcagacttgccacttccttccctcttagaatggaagaagtgacccaggccttcgggcagtgtcctctcaccccctcagacttcacacttctattccccactctgccgcattcaactcgttttctactggcccattccctaacacctgaacatgctctagtacctcccatctggcttctgtgatgttcctctacctcaatggatcattctggatgtctcctagatacctttaaatccagcagatcagaacttcacgttgatttgctgtccttctgttttttgagttttattgttatctgcaaaccccctcctagttctttcattcctggtaaacagcattatgattcacagttgctcaagccagaaaccacctaattctttccttccctcacctctcatatctaatccatcagtaagccctgttaattctgtccccgaaatacatctcgaatccatccacttctcttcatattcacagccgccaccaccttaatccaggtcataatcaactactgtgctttctgatctaagtaaacatgttagttgtgcactcaggtccagctctttgcgacgccacggcctgcagcccaccaggctcctctgtccatgggatttcccagggaagaatactggagtgggttgccacttacttctccaggggatcttcccgacccaaggatcggacccgggtctctggcagcgcaggcagatttctttactgagccaccagggaggcctgatcaaagaaatggccttcaatgagctaggcatctgggctcagccgtgtccgactctttgcgaccgcatggactgtagcctgtcaggctactctatccatggaattttccaggcaagaatactggagtgggttgccatccccatctccagggaacctttctgacccagggatctaacccacatctcttgtagctcctgcattggcaggtggattgtttaccacctgagccaccggggaagccccccaaagagctaaagcaatcttaaaagaagattgttactcctttaattaaaaccttttgatagcttctcagtatccttaaaattcacattccttactttgactgcaggatccgatccttgcctctctcccccctcatccatttgatctagtgataccctcttttctcagttcctggaacagcccatgttcatttttgcctcagggtctttacttctgctgctccttcaacctcatattctcccttctctccttcaaagaagtctttatccttttaacatagcttaaatagcaacgcagggcttcccagctggctcactggtaaagactccgcctgccaatgcaggaaacacagatttgatccctgggtcagagagatcccctggagaaggaaatggcaacccactccactattcttgcctgtgaaatcccacggacagaggagccgggcggactgcaacccatggtcgcaagagttggacacaacttagcaactaaacagccaatatcaccatttctcacagcaagactccctcccaccattactctttcctcctttatagtatgtatcacaatttgtaattctgctttcttcccttaccagaatgtaagtagtaacagagaaattaagtaacttactcaacaactaattttttaaattatttaagtactttctctgttaagtaatgtgtttttaaatgcaacagtaagcactgtccctgctcttgcagagcttaatgtcacaaacaaccagtaacagatgctagacacacatccagatctggctcttaaccacttggcgacactgcctctagctgcaggacactggctcaaggggcagcaatatgcttagtagatgctcacttgctaatggaaactaaggcttggagagttaagtcatctgccccaaggagcacagacagattacctgaggaattaagtacagtcatgaaaaaaggcacagatacatttaagtatggagaatgttcaagaaacaaaaaaagaatccagtttaatcaggcatggcaaagaagaaatgctggaggataaggctgctgctgttgctgctaagttgcttcagtcgtgtccgactctgtgtgaccccagagatggcagcccaccaggctccaccgtccctgggattctccaggcaagaacactggagtgggttgccatttccttctccaattcgtgaaagtgaaagtgaagtagctcagtcgtgtcccattcttagcgaccccatgggctgcagactaccaggctcccccgtccatgggattttccaggcaagagtattggagtggggtgccattgccttctccaggaggataaggctagaagaacataataaaacagtgtgaaggtattagccattcaataaatatctactgagcaccaactacatgccagcaacagtaataaactctagacaggggtgatcaaggcaaagtcctcataaagactgcagtttatatctgtgaaggcaaagtagaagagaaaaattacagttcagaggaatatatcttgtagtagggtcaggcagaaagtgctatgggaacacagagagatgacatccaattcaaggtggggcatccaggaagagcacatcagttaagtgatgtccaagctgatattacagaggttagttggaagagaatatgtggtgtgcacaagcccttgcaagtatgtagttgaaaatggcaggaaagtaacaaaagccagcttcagttggaactgtcgacttgctgtctatatagtgtcaaggaacttgggactttaaactgaaggctttaagtcacctatgttagaaagctccctcaaatggcagcagaaaagctgaagggaggaggcagagaccaaaagcaaatagatatttagaaagtagaaggggactgaatgcacatgtgaaaacgagggagagaagcaatgccagatctctggcaataaccagagagcagaaaaatcagggctctgtagctaactgacggagaaggcgatggcaccccactccagcactcctgcctggagaatcccatggacggaggagcctggtaggctgcagtccatggggtcgctaagagtcggacacgactgagcaacttcactttcacttttcactttcatgcactggagaaggaaatgacaacccactccagtgttcttgcctggagaatcccagggacggggagcctggtgggctgccgtctatggggtcgcacagtcggacacgactgaagcgacttagcagcagcatgactaactgatacagaagatgagagccttgggcggttggaaacaaaggttttagtttagcatacataaattggaagcaccttggtatgtgaaagtggaaaatgacatgcagggaaagacacggttaaatgaatgagaagataaaccacagattgggagaaaacgtttgcaaaagacatatctgataaaggagcaaaggaaaaggtgctccatatcatttgtcatcagggagatgcaaatttaaaacaaaaataagatactaccacacaccttttagaatggcaaaaaccaggacactgaaaacaccaaatgctagcaggcacttggttcaacaggaactctcattcattgctggtgggaatgcaaaatggtacagccacttgaaaggcagtctggcagtttactacaaaactaaacagggacttccctagtgttccagtggctaaaatgccgagctcccaatgcagggggcctgagttcgatccctggtcagagaattagatcccacaggctgcaactaagaattcgcacgctgtgactaaaaagatcccatgtggtgcaactaagacccagcatagacaaggaaactaaacatgttcgtatcatatccagcaaatcatgctccctggtatttatctacccaaaggagttgaaaatttatgtccatacaaaaacctgcacacagatgctgacagcagttttatttgtaattcctaagacatggcagcaactaagatgtcttctggtaggtgagtagataaataaactggtacactcagacaatggaataatactcagcgctaaaaaagaaccaagctatcaagctacaaaaagacatgaaggaaatttaaatgcacatgactagcagtcatgcatggagaaggaaatggcaacccactccagtgctcttgcctggagaatcccagggacagaagagcctggtaggctgccatctctggggtcgcacagagttggacacgactgaagctactcagcagcagcagtagcagcagtcaatgtgaaagacgtacatactgtatgattccaattatgtaacactctgtaaaggacaaaactatggacacagtaaaaacatcagtgcttgccagaggttaaggaagaaggagggatgaagaggttgacgacatagatttttagagcagtgaaactatttctgtgtgacactattaacggtgggtacatatcatttgtcaaaacttgtaaaacctaccaagagtgaaccataatgtaagccatagccttgagcgataaggtgtaggtacatcaactgtaacaaatgcatcgctgtagtggaagatgttgataagggaggaagttatgcatgagtagggcagagtatatgggaaatctctgaactttctgttcagttcttctgtgaacctaaaactgttctaaaaagaagtcattaaaaaaaaaaaacatagatatgagcaagagaatacatgggtctaggtttcacaagcaaagaaatctgagtgtcataagaatatattaatagaaatagtaggtcaggaaacaagtctgtactgagtgtcagccactgaggatataggaataaaagaccacaatccctgcccttttgcagtagaaactctagtaacactagccatggaaaaccaaatgactcaaaatgcattagaaaaatctttcttaaggatttttttagggaggaaaagtttatacctaggtttttctttaagggtgggtaggaagtctgaggttttcatatattgattttgtttgtagtgaggtctagagcaaaaataatcaaaacttaaaacattttataagatgtatatggacatttcataattataactgaagtctgtaaaacagatctaagccacgaaaaacttcaatctctgaaaaccaagtaaatcaattccttcaaaatacaaagttgttgctctgcaaatttactgaactttgtttaccctccttatgtaagacctgttttctaaacactgtataagctgaaaataaaatcctattctccatattacgtaactgttaccatagctagatgtttcctttgtaacttcaattaatcgtagcctaacattcttttaaagtatagatattaaagtatattgttctacaacaattttgtaaaaatttcccaaagcttagaacacattacactaaattgaattaaatttctgaatttgtagcttgtgtaatatttatcctgaaaagttcctcatctatcatttaaattgtacttcagcttaaaatattattaaatgttcaattaagctgcaaaataaagaggggtcatgcaaagcaattctataacagagttaaagaaactattttggcaaagccaacttcagggttgcaactaattattccagatcacaaatgtctgttgtatattttaattcccagaacaaaaaaattacataatttgtacagtccatttgaggtcaaaatctacgtgtcatgaatttctaacagctaaccaaaatcctctcctccacaatttaagccagtatctcccaaaacaaaattaccagaccattacatttatcaccacactacactctgctcttcagtaatgtccaaacaagatggtgacaccatagacacctaacactcagaaattcactgtttcacttttctaagttaagacttcaaaaacaaactgacccatgaatttgattaaattctagatcacacaagacttacccagatgtcttactacagaaattttccaacgccatcatcttcaaaagcctggacatttatcatctaaacctcttgttttcatttttacgaactaacaaaatgcactaaaagaaaatctatgcagttccaacatatccaacataccaaaataatctcataaatctaacagccttggcagcaaacatttactgagcacttatcatgggcctgccactgctctaagccttaagcccttcacctactatctcatcaattctcccaacaatcctacgaggtaggtactgttattacccctattttgcaactaatgaaaaagaggcagagagaggttaagtatcttgcccaaggtcacaaaccggtggggcaggactggaaccaaagcaggtagtctgacttcggagtccgcgctcccaacgttcaactgctgcaagagttaacaatttacctttgacagccccttatcaagaaatggtaaatgttcaacagctaaaaacgggcagtccgatccctgccctatatccgtgctcacggcttctacgactttgacaaatcggctgcaccatctgattttccgaacacacaaactggacttctctggatgtcagagcaaattctcaatctttccaggaacgggaaaagaaaaacctacgcaacactatggcccagattatccacattcctaaataataaatctgggagagtccagaaaggcccccaaactacccgacaaacgaagcctacgaaaaccaacgtttacaataaaaagctggagcttccctggcaaatcgttcacgcgatctcctctctaacgacataaacaagggaggaggctgcattcttcccaccgcacaatgaaagcgcaggccggagcgggaaagaacgcagcgcaatcggggacgacagctcccggggtcgggggcaggcaggggaggccaaggacggctgagtcgccccgtcctgcccctgggccggtgcggggaggggccggagggaagagccggccactgcccgcactcagctgacctccgccatgttggccgcaaaccccgggaccctccacaacaaaggccggcacccgggcgcagggagcgccgggcgcctcccccggccaggcccgcctcccaggcgcgcgggggccgggccggtcggcgaggaggcccttccccgccctcgcccggccgcgaggggccgacccccggcgcgggcctgccgggccccgggagccgggggcgggggcgagccggctcgcctccgcgggcagggccgggcaggggaggggaggggcggggggcggcgctcggccgggcggccgggctcgggccgagacaaaggcgcccaggtccggggtctgcccgcacccccacccgggcggcgcgacccggcccggccgaccttcccgcccgccgccatgaccgggcctggaagtcctcctcccgcggagcccctcgcggccggctcctccctccaggccaggcccgacttacctgtgggcggagagcgcgcctcggaccccggtcctggctcaaacgcgctctgtcgccgccgtcaacccccgccaccgcgggcagcgccaccgccgcctcctcgtgccaacaccgacgggacactctgggccgccgctgccgttcgagagtgcgccccgcaacggccgccccggctcccccctggccgccgccgccgccgccgtttcgcgcgtcctcgagcccgccgcgcgctcccgctaaataccacacactgcggcggccgccatgaggaggcgcggccccgcgcgccggcggcccggagggggcggggcttccacgggcgcgcaggcgcagaggcgctcgcgcggccggcggcgactttcgcgggtcgaggtgctggctttcgagagtggcggttggcgcccgggttctgcgggcagttgctgtaactgaagacctcgcgaccaacaaacatcgcgctcatgcccgcaaccgtcccctcctggggaggagcagggcttcgctgccgcgtctgggacccggtttgcgcgcccccccgcggggctttgttccgcggcccaaggggtcgtcccgcgcggcggccccgctgtctacccacttgctgttttcacacagcgcctcctgcggctcttctcaactccgctctttcccaaaggaaaaagaaacgggctgccttagccaccgacctggacccccacccctaaaagggaagaggtccaagccccttcctttagctttgagctgctcttcagc

SEQ ID NO: 142 - DNA, 86902 bp, Hippotragus equinus
  source 1..86902: mol_type = genomic DNA
tttaggagacaaactgcagactgaatcaacaccagtgtgaaaacgcagctggtgggtgtgcgcacacacacaggtgaggtgcggtgttggcttccgcacacagtgaaggccagcaggttaccactggaaatcaggggacacaacttgaggaaatacaaccccagagcaaagagcaccaaatactgttgctgctcatcacactcagttgagtttactgggccaataggatacacggtctctgagctgccttattaagggtgacagtaaggataaaaatgctgagttgttaattcctttgcttaagccattctttattagaacccatcctttttgtaatcctgcacatcggtttgaaatattactaaaaacaaaaataatcgtgaagcattttcgatttttgacctttcattcccctagatgacttgtgagtagtttacatttgttaagttggattttctttcaggacagcaaagaaacaatctctacacagatctggttggagagaacatggtttaattaaaggcaaagctgatttcagcagctgcaggtcttgcacagacagaccaaaacaaataaacaaaaacaaaaagaaacacaaaagaaagtctgctacacagaaccagtttctgatgaagattctcctttccctcctcattactccacactgaggatgataaggcgaagaaccccgccccaagagtcaaaaaacattccaaacaccaaattctcatgcagaaatggggctgcagacaggacgtgggcactgcgggagcgggagcgagacggcgaacctggtgggcatgtcgagggtgcaagagttggtgacggttcaaacactggaatgttgcagctgcctgaatgcagagctcaaacacacaaagtgggtaaaggtagcagggaaggaggctcgggagggaggggatgggaggacggtggtcacggaggaggggctggagagaagcacaaagggtttcatattgccattgggtgggggacttcaccctttcagacctttccaaaaaaaaaaaaaaaaaaaaaccaacacaacatcaaaaacaaaaaaccccaaacaccatgtcaaactaaaagagcagtaatgtaagcattcgggactccaaccactctctcggaagagcaatgagcatgaatctctcaccccctttcattgctggggttgcccagactccagtgacgaccagggctcctggatgtgctttgctctgtagctgtattccagctcttgagtcccacgctagctccacacactcacacgcaccacccctcccctccagggagcagggccagcgtgcacacacacgaacattcacgcacgcaaaggagagccctcccagaaaacaaaccctaccactagcacagcaactggacatttagattgtttccataatttccccttaaaatattacttttccaggaaatgactatcagaaatgctgtccttctgtttctacacaagaaaactcttcagtcctctttccttctaataaatatcagataaaaagtttcttttcctttcttccgccttctccagagtggactccactgtgttttccttctgtgcctgatgcacaggcgtccgtgtcgccttggatttcctctgaaagtggaggctgggagaccacagccgggcaggggcctggccgctcagcgggccgtgcgcacgccgccacttccttccgtttcagactgtcttttgggccccaactgctggcccccatgctgttgcttcttggcgagatgttgtacacgttaggaataaaaacaattacagcacacagcacagggtagaaagggggtggaggtagggactggaggaggtgggtggtaagtaggatgggggcacaaaaaccaaccaaacaaaaagtaaccacactgaaagcttctacctattaaactgtgtcaggccatgaatggactagcctgcctgctgtgggactgcctgcgacactaccgtaaaatggacaggagtcacaaacgttcctttagagccctacggcagtcctcggctagtccagcccagcaccagcagccatgcggcatcctcagctggggctcaagcacctacagagtgaagagcatttctggctggagtctccaggctagaggagggcccaccagaaccttctgagtccaagcggaggccgcatcctcgccctcatggaccgtttccacgggctgaagaggtcggtttccccatcctgtcaccaccgacctctcacaggagcagtgcacggggttttccttgctacacactgactagaagaagcacatctgtgtatggagaattcagtgtgatatcttactaccgagagtaataacagtaataaaagatggtcaggagtaatttcaactacattctcagtcagcaaagcaatcattaatggattcctattttattccccaaagaggaaaaaaaaaggactgagaagttcccattggcttctcccatctgccttcccttctcagctttcacttcccgtgtggctggggacatgcacgatggagacggtgagaggcggtgagatcaggtgactgagtgagacaaacagcagttcctctccccctccggaaggccccggggggacggagagttcctgatggttttttctttttgttgcactgcggacatttcgtgcacactcagcgggctggtggaatacttacaccctctcaacagcgagacacagaaaagagggctgccacctgcagggaactgtgtgggtcagtcctgcaaacccaacatgccatggtttatggagccttcattcccagggtgccgctctggcctcagtgtggaggattcatggcgccttgtccccgctgctgtttctgcttctgctgcattaacagctgctccaaagcggaaggtccaggatgcatcatggaactggaccagatagactgaaaaacagcccagagcttgtcagcagaggtcacatgcctggttgtctgaaagggatttgattttcaatcccagccaaacataaaggtgtgtatgtcccaagatctccaaaccctgaaaaaatccagctattacaaggagttgctgtaagaccaggtccttcaagactggttagttagttctcattaagatcattttaaaccagaaaaggtgaaagtatgttttctataaagtctttttactaaaattcagctccatgtgagaacagacactgactaacaaggttttaggcaggcaaaacatttatgaaattagatatccttcttttacttgttcagaaaaggagtaaagaaagtatttccagatgagtcagaattttcttaatcttagaatccaactaaaaccttcatgtctgtcccccagaggatactggtttatcactagtgaattcaaaaatttaaaaaaaaaaaaaaatccttttaaagaatcttataatgcagaccatgctttggagactttgccagatatatagtatgaatcaaacaatcctaagggccttaggaataaaacgagctatttatgtaaatgaatacagagacatctcatatggttcttgttcctgatccactcacctttaggctctccatgaggacagcagaggaatcctccatggatgggccatggcctgtccaggagccacttggagtgctggcctgatgccaactgctctcagaggatgatgctgctgagagataatcgatgccaaacccacccatggctagaaatgaagagaaaagaataattcaagaagatgttctttcactgtcaaaggtccaggaaggacacaaaataagttagttcacttctgctaagcaatgaagactggatctcacctggcttatcagttttccaccggtctgcagttctcctatccctgttatctggagtcccaatgggtccaaaattggagaatgggacagaattgtggttgtgtgttggaggggagcttggcaggctgcttgggttggaggaatgaggagactggctggctggtgttgaatgatctattgaataacagcaatgcaagacattaaatagaaacgtttcacaaacaacaagaatgaaagtttccggtagatttgatcatttaaattctcttaaaaataaccacagggtttcgggagaaaggcaaaataaaggcccccagagggaccctgccagatgtactagtctgtattactgtacatgtctaaggcactttccttaccttaaaaataaaaatgtggacagttttgtcaaacgtatgcattgttttggtgtgcctgtttcagataagtatatactggtcttctctatcagggcagaattgcctaaccttaagaattttcctgcaaagaatgaatatctacaaataaaactaaaaaacagctgcaaaccttaagataaaactcgtatttttctcccttacaactgtgctcattactgagaatgtaaaacagctttttttaatggcatttattatgtgaaccagctcaccaggcttttttacaccccattttccttcagaagttactttaaaaacaaatacaaacaacaacaaaaatcatagtaacagacaaaaaccaccaaatacataaaattaccaaaccacactatctttcaagtgtacgggtaataatgcaaagtctataatttaaagactagtcaatacctgaactggcaggaagagatggagaccatggagtcccttcaaaaagggagtacaatgatgtttcctggggagccactgagggattaagttctgctttggagctgggtgtcaggtttttcccgtatacctcattgaacacactgttatttgggtatcgttcctgaaagacagcgaccaccaagttaacagactcactccaatgaaagaaaatgtagtgttcatgcacatggatgcttgacagatcttaagactttctttgcaagacaaacttttgaaggcttttacttctgtttctttcagttttcctgtttttattcatttgctttttactttcccccaccctttatcctgttctatgtaaaccgctcaggttaaaagtatgaataatttacttggctgaacaagagagccccatttcaaacttataaaagtctccagtataccctaatcaaagcggggggaggggggagggggaaggggtaaaatcagatacctggaaaataccaatatatggaagagaaaggaaagagaaaaacagatgtattgagacacactgggaaagaaaatgctagcccacagcaggatgcctcactgtttacgcacctgattgagggagaatccggtgagagacaggaaagaggatgaatgtgacatgagctctgagggcttctccagtaaggatttcttcacagtcccagagggaaaacaaaagatagttaaattacgctttccattttcttagtaggaattttaagataccatacaagcaaaataaaggaccacaatttaagaacacctgtattcatctctcttgtacaaattaaagcttagaaagtatcaattcaactcggattactttttactaataccatggtcctgctaagggccagtcatcacaggtgagtcagacagaaccctcctgatcagtacttctaacttaagcacagagatcctggcagggaccctggaaactggcagtactgagtattcactaggtaagaacctcaggaatccctttgtcactagctgcatttaaaatgctctcaaaacaagacgctgaactgatcaaacactgttttcttcctaatttcttcccccctcgctagaatcttaaaaacacaggcattaatgactttaaaaaagcctttagatccatttgacaactggctttgttagcatggttcctaagcaactctatttgtggtatgtattcaaacacttgctaaagtcaagtttacatttattggtccttaagaactcattggtttaaaaaaaaaaaaaaagctgaatctctgatgctcactatcactgaactgttggtcaacaaagcatttattaaacacctgctatatgcaaggcactgtcacacacatgacatcattaatgatgttaaatataggaagggttatagttaaggtgttttttctttttttaacatgacaaaaccccactaaaagcaaccccccgacccccgcccctcctgtttcaccatgaggtttatttccaaaggagaaggtaagcacaacaagaattaacggattaggaaacaagtgaacagaaaggccctctgcccctaggcccttaagccacccagccaaaacaaaaacaaaacagcaagaaaggcaaacaggtagaatcaacagtttagaacgttttcttaccctgtgtttatggaaaagaatcagcaagaaagtggaactcaaaaatgttttacgctttattaagaagcagggaaggggaaaaaaaacctcatagcatacatctttcttgcagttcccgacctcagtaaaacatgtaaataatggcatcctttgaaatgcagactgggatatagaagattatttttaaaagatactactaatcaattcttagatcttatctctgtgctcactcattgatggtactccaatcgtgtttttaaatcgagtcctcttcatattacaaatctggctctgaatttagatcagggcttttagttaaccaaacagaaaagaaccacttactgtttagtaaaatcaatctagaatctttttattcagtaaaacacctggaacattatttcatttcatattttgaatacatgaggaaaaatctcactgttcctaagccagattaaatgacacctaaaattcccgggccaggtggaaatgacagctgaaaaggaagttaatttcccagcgttacatcttgtgtgtgtccagccctgcaggatgctttctggataacatatattacaaagctacaagatttgggcaaactatgggacgaagttttgccacattttactgtcacgtgaatgttagtttgggcaatcaggaaataagctttaaaattctgtttaaaaaaaggaaagccctagaaagaagaaactacctattctactagaaaatctcagaagaaaaggtaggggtcacagcaagaagaagaattacatcaaatacatacaaagaggcttcgtccaggaagagaggcgagaggccccagcagagctgggtaaagatcaggagggttagaaaaaatcagctcttcctcttcctccaaggcagccagactctttaacaggtccggaggaagcagaggggagcctttggggtcctagtgacagaaaggatcacagtgagatgcaataagggatgacaaaagcacagcggagtagcagcatcattagggagacgacggcagctaaagtcaaggaggaagctgtaaggagcagtaagacggcattacgcaaagaagaacaggcttcgaaacaccaaagcaaagtgacacaaggacaatgagaaggaaagatcaagacaacggaaagaagtaaagacagtgacagacagagcagaacataaaaggctaaggtggacagccagggaaacaacgcaagggagcagagagatcagtgttatcttgggctaacagagaaacagcttttttaaaaaaagttaccaacacacacctgtttctcatgagtgaaaagggcaaagaccgggaactccaccatcaaagatgacaggctaaatttgttcctctcagaaagccacttgcttaaatatgcactaaccctacttttaaacttagatgacccaccccaactgaaaggagctttgtctcagaattctctaatgtgctgccttaagagatttctgcacatggtcctctctgccagaccgtcaagttcaacgtcaggaatggtgttcttcagcttccccaaatctatgtggtgtgaagagggcaccaagagctgcgcccacttactcagtggtgttctgtagcactaacgagatcagagggacctttaaacatctacctgagacctctgaaatgcctagtgacagggaaggacacgcacctcaaatggcatcctgggcacagggtcctgctctggacggaagactcccggggaccgtttgcccctgcggtccacactggcttgctgtgccatcacagctctgttatcagcagcgctgtaggaagaatcccagtagaactccgggatcttgacttctgaggggttatggttatatggctccatggggaaaggcttcatcgttttctcaagaggctgctgctgccttacaggaggttgcaacgacggctcaaacagttttatggggtcttgggtttgaaggtagtagggctgtttcacaggcatgattttccctaatgggccttgaacctgagggggattccacagctgtttggaggcatctgcctgttgatactaaaaaaagagatgcctggttcaccaagatgaggataaaatgcaatgttacttcactcaggactcacagagagaacttgagagattttaccaccaacaaaactctgggtcacgcagggttgttgtttctttaggttttttaatacacagagctttttgagaacagattaagggcactgagttcatattctctttcacttccaatattaagaggtttaattcatgagggtttgagtgtgggtgggtgggcacgcatccatttccccttctgctccaagggctgcaggatgataatacttaagactggtgtcacagttctcttaacatctcatcaagagcacgattctgtttcccttctgtagttcaggtttaaatatgggaaattcttttcagaaaatccctttctataaagctgacaagcagtagcagcaaagtatggtaggtgctatctattctcctttacaaaagtaaaaagaacaactgaactttcctaaacagcaaagactgctgggttcccataagcattataagtctaagcaaaaagtagctgaatgcttactttttttttttttttaattggaggataactgcattacaatgttgtattgctttctgccatacaacaacctgaatcagccaggtatgcataaatcccctccctcccacatcccacccttgccccaccccgttccaccctccccaggttgagctcctgtgtcataaagcaacttcccattagctctctattttaccaagggaggtggattaactagtatttttaattaacttgacactgaatgatttcaggtgctcctctcctcacctcagctggaagtacacacaactgtaactcacctgttggaatccagagtggtgaggaggacttttccccaaagccggcacagcttttgtaggggactgctgctgctgagctagagcttgaacctgcagctggcttgcagtctgtgctgctggcggagcggggagaggtgggaggggctgctgggacggcggctgaggctgctggggtccctgggtcacgggccctggtccggagggccgctgctggctgtaagggatgtgggactgtttcccagcttgcacctggtttcctgctggagagtgagctgcaggctgaaggaaggttcctgggacagaaacaccagctgggaaggtgtaacctgagcccatagaaaatgccacaggaggggggataacatatgttgggggcgggaacccttcaaaatagaagaacatcgttttagttctaaggaaacttagcaaacgaaagacaaaaattagtcatttggggctggggtggagaagaggttttctaataaatcatgaaagacagggatcaaccatcaagtaagactcaagtgtcaacctttaacctgatttcaagaattaaatacaggttactgcctgctacttctatccactgaggcaactggaatgtcctaaaggtttctcagatgccatgtttagtgacaggcattccttcataataacaagcatgtacttgcacagaaactacaggtaaatggctcaaaaataactgaaaccattagggaaaagagaactaccttataccttctaatattaagggtttagtaatgtccttcagagtctagaatttctcagcaggtgaatagaaactcctacacagatggaattcagcagaagacattacaaaacatgtatttacctggccggctgggaagaggagggaaggctccagggtgatgaatggggatgaactgggagttacttgctggacttggggtttgagttacaggtgttttcctggcttcagacactggagtctttcttaactctgtctgagattttacctatgaccaaccagaagcaagactatctataataatctgaaactcaaatgagacagaaagcagcacctactctaacaaaggatttaaaaccctatgttaaaaaaaaagtaaagtacatgcttggtccactggagaagggaatggcaagccacttcagtattctcgccttgagaaccccatgaacagtatgaaaaggcaaaataataggatactgaatcaggaactccccagaattaggtgtccattatgctactggagatgagtggagcagtaactccagaaagaaagaagggatggaaccaaaacaaaaacaataccctgttgtgcatgtgactggtgatagaagcaaggtccgatgctgtaaagagcaatattgcataggaatctggaatgtcaggtccatgaatcaaggcaaattggaagtggtcaaacaagagatagcaagggtgaacgtcgacattctaggaatcagcgaactaaaatggactggaatgggtgaatttgactcagatgaccattatatctactactgcgggcaggaatccctcagaagaaatggagtggccatcatggtcaacaaaagagtccgaaatgcagtacttggatgcagtctcaaaaacaacagaatggtctccgttcgtttccaaggcaaaccattcaatatgacagttatccaagtctatgccccaaccagtaatgctgaagaagctgaagttgaactgttctatgaagacctacaagaccttttagcactaacacccaaaaaagatgtccttttcattataggggactggaatgcaaaagtaggaactcaagaaacacctggagtaacaggcaaatttggccttggaatgcagaatgaagcagggcaaaggctaatagagttttgccaagaaaatgcactgctcatagcaaacaccctcttccaacaacacaagagaagactctacacatgacatcaccagatggtcaacaccaaaatcagactgattatattctatgcagccaaagatggagaagctctatacagtcaacaaaaacaagaccaggagctgactgtggctcagatcatgaactccttactgccaaattcagactcaaattgaagaaagtagggacaaccgttagaccattttggtataacctaaatccaatcccttatgattatacagtggaagtgagaaatagatttaagggcctagatctgatagacagagtgcctgatgaactatggaatgaggttcgtgacattgtacaggagacagggatcaagaccatccccatggaaaagaaatgcaaaaaagcaaaatggctgtctggggaggccttacaaatagctgtgaaaagaagagaagcgaaaagcaaaggagaaaaggaaagatgtaagcatcggaatgcagagttccaaagaatagcaagaagagataagaaagccttcttcagcgatcaatgcaaagaaatagaagaaaacaacagaatgggaaagactagagatctcttcaagaaaattagagataccaagggaacatttcatgcaaagatgggctcgataaaggacagaaatggtctggacctaacagaagcagaagatattaagaagaggtggcaagaatacacagaagaactgtacaaaaaagatcttcacgacccagataatcacaatggtgtgatcactcatctagagccagacatcctggagtgtgaagtcaagtgggccttagaaagcatcactacgaacaaagctagtggaggtcatggaattccagttgagctatttcaaatcctgaaagatgatgctgtgaaagtgctgcactcaatatgccagcaaatttggaaaactcagcagtggcccacaggactggaaagggtctgttttcattccaatcccaaagaaaggcaatgccaaagaatgctcaaactaccacacaattgcactcatctcacatgctagtaaagtaatgctcaaaattgtccaagccaggctttaacaatatgtgaaccgtgaacttcctaatgttcaagctggttttagaaaaggcagaggaaccagagatcaaattgccaacatccactggatcatggaaaaagcaagagagttccagaaaaacatctctttctgctttattgactatgccaaagcctttgactgtgtagatcacaataaactgtggaaaattctgaaagagatgggaataccagaccacctgacctgcctcttgagaaatctgtatgcaggtcagcaagcaacagttagaactggacatggaacaacagactggttccaaataggaaaaggagtgtgtcaaagctgtatactgtcaccctgcttatttaacttatatgcagagtacatcatgagaaacgctggactggaagaaacacaagctggaatcaggattgctgggagaaatatcaatcacctcagatatgcagacaccaccacccttatggcagaaagtgaagaggaactataaagcctcttggtgaaagtgaaagaagagaggcaaaagttggcttaaagctcaacattcagaaaatgaagattatagcatccagttccatcacttcatgggaaatagatggggaaacactgtcagactttattttttttggctccaaaaatcactgcagatggtgactgcagccatgaaattaaaagacgcttactccttggaagaaaagttatgaccaacctagatagcatattcaaaagcagggacattactttgccgactatctgtctagtcaaggctatggtttttcctatggtcatgtatggatgtgagagttggactgtgaagaaggttgagcgccgaagaattgatgcttttgaactgtggtgttggagaagactcttgagagtccttggactgcaaggagattcaaccagtccattctggaggaaatcagccctgggatttctttggaaggaaagatgctaatggtgaaactccagtactttggccacctcatgtgaagagttgactcattggaaaagactctgatgctgggagggattgggggcaggagaaggggacgacagaggctggatggctggatggcatcactgactcgatggacgtgagtctgagtgaaatccgagagttggtgatggacagggaggcctggtgtgctgtgattcatggggtcgcaaagagtcggacacgactgaactgaactgaactgaactgacatgcttattcacctcacctaaattaaaaatgggaaaatcatattacttaaatacctcaaaaagctgtaagggcttagttttacttgtatagttattttgctttcaaaaatcacagaagtacgaaatatggacgaggactgagaactcatttcttttataaatgacacacccaatgccaaaagggtgaaacagttgcctattttcttaagccaatgttatcagccccagggccatgtattctctaattcattaagaacatacatgaattgataatgatcactagctcacagatgagacacttggccctcagtgtaacttcatctgggaggctttaaaggtatcattcaagcacccaccctccaccctgcaacgctaccacccccagaataaatgaggatactttcagcagtaaaaaatcaggcctgagatcctacacgtggcgctcgagaagcagatgccatatgcactgctcaagcaatataaagatgagcaaaatgaggaaaaccggcagcatttaatagaaaactcaggatgaggtacagagggtggtgacacactgattattgtcaggctttctttaatcacagatactcagatttaaaagggatgagagactggaagagacttcattttcttggacctttctgggaggcagcttcagagaatgaaggcagagcaggcaggaaacagctgaactcttcacccctaaaacactgatctctggctttatagttcttttggcatttgtcccttgcctttccccaacacctttcactctctctgtgcctttcctcaatttctaccatgtttttctctgtttctccccctactattaatattaaaatggaactattatgtcctttcccaaaaaaaaaccttgtaaggaaaatacactgtagatattttttatctgaaggcagctttcaaaaatgtaagaatcctcatgcctactgtaaataaatacattagccagaatgtgtttaatgaatcaaatggctacaaacattggtggtattaataagaccagcacagagtaaagacctttttctgtttatatgaaatcatctgtatctctttggtaagatacatacacacacatatatatataaacaagtcacaagtaactgagtagtgtttatctttccccagcaggagacttggattcttgctttacaaattcccatgagtcaggataacactgaggttacacaatgctactggctggggcagatggaaatgtcaaggaaaatctttttccaaaaatgtatttcattttgtagagtgaatctgggaaaaaagaaaacaaaacgaaacgaaacgaaataccactgtgtaagccttaacatactcagctatgtgggatatataaatatctcaaattttttaaaaatcgcagttatagctcccaaagaaaatgtaattatttgtgaaactgagagctctgcaactggtctcatttcctaccacttaaactggagagaactgacaaagatgtccaatcaggttaggattttttcactcatattacaatttctgtgaactgacaagagtatcgatctaccacagttcttcctattacctggctatgcagccttcttagcgtgcactgaagcttccgaaacagccacttcacaagggtttagtaacggaatggaactctcgccttttgagagcctcctctacctgctttctagctcaagcacagctcacctgcagtgccacactctgccttcctgtttcctgcaccttttctagggtgcctttcctggtttctgtttccctcttgttgtcatcctttccatcattcttagttacagttactcctttgctacagtccttctcacctctttgggaggaaaacttcttccttggtctctgttcgcttctcgtggcttaatgttctctttgaaggtgaccactggtttctctcctgtgtcacagctgttgcttagattccggcctgtagacagcactgatttcagtcctgggttcccgtcagctgccagggactctatgatggttgtgtcttgcagaatgaggttctctttggcttcactggggtcttccagtattaactctgggatttctgtgataaacaacaatttccctacctcattttcacactgaatcagcctaaaaagagtaaaaataaatccatatatgaaaaacataaatctaaaaaacagtaacaactgaactttgtatgggtcccacagccttaaaatgtgggaaacagcaggatgcaatagtgtggatttggggaacacaaacagtttccgcagaaactcacattctcattatgccaccacacatcaccacaacacacgcctagacccttttaacgtttttctagtaagtatagttacgtttgctcagcatgttttcagcacaaggcactagagtaggcccttgaagttcctattttctaggtgtgaaaactgaagctcagagatgccacaagcatcatcctggtctgtcttgactgaaactgaccaccatgcatgcccttttcaacacagatcaccataactgtgaacgtacaatttagttaagatttatacagacgtttataaattggagaagcatctcataataaataagggagacaaggccaattcctctaaaagaggcagtgtaatgagaggacagagattaaagaaattctaaagatcactagggtcataatctgatgctgtgttcccaaccttttgatttaagagtttataatcaatagctttatacccaagtgtaaaactcatatggggtatgtgtatgtatctgatgaggaataccttggctgattatctgcaatccatttgcctatagagatcaaacgctgctgtcgtatttgtcgttgctgaccctctttgtcgcctgtaataccctgatgacctttggaaaaatccaagttcctaaaattgacataagcaaattatagaaaattaaacctaatgaactgcaatggcttcagatttttccatacaggttagctatttgttgtaattagctccatttgcttgaacttatttatactcttaaagactgtaaataccacgaaacaaagcaatattaatgtgatatttttatttatatttcactttctcatggaggagttgaaataaatcacaaagttatattaggaatgacttttttttaaaaagaagaataaagtttttatttaacagtaagctcacatggtaagtaacttacttcaaacaaccatggcaatgctagagtctctgagatagctattctaacagatagtattatctattcacttcaaggtggtccaacctaaatcagaaaaaaattaacacataccataaagtgtacagagcaaaaaactcattgacattagaaaagtaagccaacctaaaaaataagggtttttcaaatttctctttaagccatcttaaaaaaaaaaaaaaaaaaaaaaagcagcagcatctaagaacttccaggcagtaggccagaaactgaggatacaaagataaatagtctcccgaccgtaaggaacaaataattatgatttaatccaaagagataaaagctaagcaaagaataagagaagcattataaaagaaacattactgtcttctgataagctttgaaaaggttcacaaaataagagatacctgacctggaccctggacaggtatggttaagagcttacagattagtaagggaaggatgaaaggaatgtgaatgtttcaggcacagcatgaacaaagttttggaggaataaaaatacagagttattcaagtacaggtaggtcacagtttatgtataacatgtgtaactactggagggggaagggggtgaaagtcgcaggaaatatggctgaaaaactaagcttttggacattgagataaaaaagatattttaacaacttgggatgtgtaaattgaagttttctgtactagtaatgggacattatcaaatctatactttattactgcagaagcagagtaaaaatggactaagtaaggagagaacttttaagtagggaagtacattaggaagcgtttttatactctaggtagacagcgacaaaggccacccacctgaaagaaggtctcaaagccaagaatccttgtaactcaaactcctctggaagtggtgttgctagagaagggcagaaatcaagacttgtaaacatttaaattaaaatattgttcagcaggatattggttcctatattaaaaaaagaatattttctagacagaaagaaagattaatgctcatagttctctgttcctctttatagttactgtgataaaataacttacctgtcaagcccctacctgtggcctctgagcccgtgacattgccctcatactcacctacaactcaaggctgaggaggatgtgtacgatggactattttttcccccagcagccttaaaaattcacagctcgatccattaatcacaatgtttagattatctccttgttaactcaaagcactgaatatcaacaccacatcacccaggagcttgtaagaaatacagaatcttgggcattatcccaaacctacggaatcataaactgcattttaacaagatcccaagtgattcatttgcaaatatgatgcttgaggggcactgatccaatggaagaaaactaatcagaaaggagtcaatcaactacagtttgttcagtgcagtgctacttataatggggcaaagttttaagcaaatggataatcattaaataaattatggcatagccataggatggaatattaagcagcctttaaaaaatcatgtttcaaaatgtttaaatgacaaagaaaaattctaacagtatcttgttaaatttataaagcaggtgtgtgtgtgtggggggggcgcttagttgtgtacaactccccatggactgtagcccgccaggctcctctgtccatggaattctccaggcaagaatattggggtgggttgccatttccttctccaggggatcttccagacccagggatcaaacccaggtctcctgtattgcaggcagattcttaaccctctgagctatagggaagtccaagctgtaactatatcacataactttaacgatgtgatatcaatcacatgcagatatgtgtatgtacaaagaagtaaaagcctcaaagaaaatagagtatcgtgaatagtacagagaatatttctgtatgagagaactaagggggacttgtgttgtatgtcccaaacgtcctgatgagcaagtattattgtgacaagagtaatgttgttcacattagttccccaaaaaaataactagtaagaatgaggaagaagggaagatggaaagaatctgaaaacactactgtctggactcctattcaaatgaagcagaacaggagaataagctgagagaactacaagaggattattacctctatttccacccacttaaccaatgcaaagcacaaagtctcctctgagatactgaatttaaagtcaaacacttaagaacaaaaccttgtttttctctggccttaagcccactatttacttcctttgtggctcagctggtaaagaatccgcctgcaatgtgggagacctcggttcaatctctgggttggaaagattccctggagaagggaaaaggctacccactccaatactctggcctggagaattccatgtactgcatagtccacagggtcgcaaacagtcggacacactgagcgactttcactttcactaagcccactgtcagtgatggagaacaatgtcagcaacacaaggttgagggagcccttaccattagtacttgaaagatcttcttcatggggatggaaactgttcagaagagaaattagccatggccaaatgctgtaaattaaacagatagttcagactttatttttgcatgagaaaccagaacgctaataagccataaaaatgttaccaacaggacctagactatgtatttttctcttggtttagcattttaaatgctgtatgatttcctaaaatgtaattacaaatgtgtctagataagatacaccagaagggccaaacttccgtaacagagacctactactgcagatcagtccccagcttcctaatttaacaatcagaaaactgacttgtcagttttattcattgaaaatggatatttactgagaaacctttgaccagagaaacagcgcattatgtttttatatttttcacatacattatcagttatggaacccattactagttcttaatctgtgacatgggatgtggttacatcacagtcaaatcacattgaaagtgatgaatatgcctttttctttatgatataaaaaaattcacacattgttacaatgtccttaccctctgtctcctaacaccaaacctttgccaaagtttgcaaaatattaaaaacatattaatacttagttaaaatattaaaaataattacaatctacttaagataatattaagattttctagaaatatgtagccacaaatgttggtaaaaaagtgtggctttaaaaaatttttaaaagcccagggtgagttgcccaggatagagagattagatgcacacatcatcacatcagagaaaaaacctggaagctgacagctgtacactttaaaatataggaatatgctactttaaaatatatataaatgaataatataggaaaaaagtataaagaaacaacattgaagaataaatgtctgctacaagcttttgaggatgtaatgaattaagagacagttgaaaaggaagaatgctagactagaacaatgtctctacgcaacaaatatgagatctcaagaaacagacaaaaaaaagagtataagaaatgacttaatgatatacactgctttacccccactgtgggttacttgcctaactctgctttctacaaagaaaaaaaaacatcactatttcatgtacttatcagtttaggagaacatgttctcaaaaaagtatagaagaaaacaagttctagaaattataatggtcaaaagcaaggaactgaaggttacttgaagtttagaaatttgttttttccctcatttaaaagatatgaggattattacacattgatgtatcagacacattaggaaaatcttcagttttagagaattaccccaaactagctgaaaatgagtaacaacatactttaagataaaataaaatacctgcaaggacataattctaaagatcccaataaatctgtcagaaggaagggagaataataaatcatatggaagaaaaaggaaagaagtttgaaaataaagctacttcttctggttgaatatccttggcaatggtaagaatgcacagggagttccctggcagcccagtggttaggacttggggctgttgcagctgtgacccagcttcaatcactggtgggggaactaagatcctgcaacttatgtggcacagagaaaataaaatttaaaaaaaaaagaaagaaatgggaacgcacagaatgggcctaaaagatcactcactgtacaggaacaaaaaaaaaacctaaataaaaatatcaatgctttttccataacattactaatacaacttagtgaaccaaacacaagttctaaagtacacacgagaaggaaaaaggtatagcttctggttaagaaatgaaaactctgtgcaagaaaacactctctataacttactaatagctatcttggcatgaaaaagagaagtgtagtatgctgtgcttatgttgctaaactccattcatgacaatatcaaacatgaaggcacttaaagttagatttgacgggagaagaggtaagacgagcacaaaataagagggatcatggggtcctgaatgtggctaggacacttttcaggttgtgactttggtcaatatgcagatgctgagccacaaattagaaatttcagagactctcccaatatccatcatcaaagtatgcaggagagaagcttctcactcactgcaaagccttactggaagtatttattctattgtttaggggctaagtcgtgtccgactctttagtgaacccatggactgtaacctgccaggctcctctgacaatgggattttccaggcaagaatactggagtgggttgttatttccttctctagggaacctttctgaccagggattgaaactgtggctcctgaattgtcagatgaattctttactgatgagccaccagggaagcccatttattcctatggccaaaggtaaactgaaagctttcatttgtcactgtctaatgaattcctaagaactgtcaggaatattctgagtagagattacacagaaaatcatgaaagcccaaataatatccaatcctcagaaaatcatgaaagcccaaataatatccaatcctctatgcttagaacaaatataactcaaactgggtgttactgaaagtcaacatcaaacagcttagttaaaaaaaagaatggaagaagtaaaaaatctcttcccttcaattcctaaacagaaaattggggtgtatagtaatgaataagaaacaaacaaacaatttcattttgcaatgtgaaaaatgccttttccccaggatggcaaccaggaatgcgggagcacacagcaagtcataaatccttaagactgtgcctcccatgaagaattcaaacaagtaagtgaaaagcatacaaagaagtcttcagttcaatttctagagagtaggtggaaaatacaagtcctccactgttccaatattgtgttagacggcagtttctacatatctatggatatcaaacaaagcacacagctaatgtgaaattccgagatacttactactgtctttcatccaccactgcctcctgaaacaccctgggtctgagtctcagccagtccatggacaccttgacggcaggtaggggataggcattgtaggattcctcctgagacttgttctggagaggacacttgcacaggatgccaagaaaagacacttgaagaaaaaatgtgcgcacaaagaataagatatttgaaattgtgtaccagtccaaattaaaatattactacaagccttgggctgtatgctacttaacacttaaaatatcttacagcctctttctaaaaagacattttcttttcttagaaatgtcacagatacagttgataagggggatgttagcagctaaaaggaaagaacttagggtttaggcctcttaattcagtattacaaaataaacactttttcatgttactaatggtttgttgcaatgatgaaaatgtcaaagttcatgcttcccaaaaaagatggcacaggaagttaaatgatttaatactcactaaagagggccagcaactgtgtccaacacagctgctcatcttggctataactatgctgctccgtttcgttgctaaagtcacgaaggtgatgaagttgaaacaggttaatgacagtgacgtgaactaactgctgagagttgaaagctttctggaatagcagcctctgtaaaagaagataggaatactgaatatattatcaagaactgaagctgtcttcagcacaagaattaaactggcagtctgcatttaaaccacaagggtaacatttatagatgagtattttaattgaatatgatgtggtctgatgtttctcatgttgaccttctgccttgaaaagatttaacccagtcaccacagagctgggtttttttttttttaacaatactttttaccgcaagaaactatatattttttaatatgatctgagaaaagctttttagaggactattaataaatttatacattttaattccttagaagctgttttacgagagatggaaacgtactaaaatatgaaaccaggaccaatgatgacaaaataggtgcacatagtgaaaatcaaaatttcaagtaaaaagaggcaaaacacatgtttttgaactcttggcatgtaacaaatgtcttccaaacttggtcataaagtttactctttcaaaggcttgacacatttaaagaaatttatttataaatgagatatatagcaaaaacatatctgaaacatagggtaaatgataaaccaaagcagtcattaacaagtattataggccacctaatgcaaggagctgactcatttgaaaagaccctgatgttgggaaagattgagggcaggagaaggggacgacagaggatgagatggctggatggcatcaccgactcaatggacatgaatttcggtggactccaggggctggtgatggacagggaggcctggcatgctgcggttcatggggtcacaaagagttggacacgactgagcgactgaactgaactgaacaggcatttgtacaaataattatactgacacgttcctctatcagaaaagcaatggccttcacgaccacatttcttttacttaagaacggtgtgttcacagtgacctgctgagcatccctgtgaggaaagcttcacctgcacactctcagctgccttaatttcatcactcttctacctcaatatctgcagtagttcagagtactcccatagaaaacagttttccaacacaagttcctaacaaacttgatagctattagagatgacatcctggtttcaccttacacttcagccacggccaaatatcctccctccccaggcaaaacttttggagaaagtggggttcactgtcactagccttatgatgggaaatggattatgtcacttacacttctaccagcagtgataagagatcctaccatctcagaaatttatagctgctggtgtccagcctattctgagattttattttttacataaagaatgtgaaacatccagaataagttccataattctactaacaagatctttcacattatcattggaaaaaacacagttctgtttctcttcaactctattctccctatcatcctgccatctgtccttccagtatatacatcaagaatgcttactcctttttgaatggcatcgaccatttttctttcctttactctgaatgtcctgaaatgctatttcttttccaagtgctcccataaaactcttctttcattctctacatccaactttacagatcagctatttcacacaaacacataagattggcatgagaatattttttcaagaagtgtgcttttctatgagtataatgtatagtaatgtatcccttgtatctataaatccagtggcctttattttagaaggcaatgttctactcaacaaattaaaaaaatttttttctagtttatgtacagaaacatagcatatgagagcagccaaggactagcaaatgataatggaagttcatcaaggtacagactgtgtcttgttctcccctatatctctaagagcttagagaagtgagagaagtgcagagtatacaatacgaactcaaacacttagtgaaggaataacccatacttttaggaatatataactattaagctgtaattgcataacatgtggattgcattttagtaacagattaaaccaagactgactttttgttactcaaagatgctttcaacagcagttaaggattatactgaactaaatactgttaggaaacagcattaacagatataaaagcattgtatctcaattcctaaacccagatcttaagtcctctaatgaggacttaaggacttcaagttggtacatgtttctgcttagtagataaagacttgctggtaagacagatacactgaggtttacatgtggataatactaattatctgtaaaggctttagaaatacttactcaactatgctaaaatttcacttcaacaatgttcttctgacatttcaatactggctaaggtttaaaatagatctgcctcatactatgtttaacttcagagtgttggaataatactttaaagtgttattttagcaattgcccatatacacccaccagaacttcacaagcaaaaatatatatctgcagacaatattagtgtctaaggttgaaccaaatacaaaattgactagattctatacgagaatgacttagagaagatcttatgaaggtaggtcccccctccctccccatttagggagtatatcttgaatagaaccagagctggaagcaatctcaaaagatcatttggtccaaccccctgctattcaatgagactgcacctaaaccattcaagaaaaatggctgtcaatttgacttttaagctctcaaaagagaaacctcttagtaaccccgtacaagtctctatttgaattttatgattttacttctgacttcaggaagacaaagatgtgttctttttaaaataatccttcatgtatctgaaaacttacaatgaataatatttagacttgttttttctcggctgaacagcctagggctttaaaaagttggttgtttctttcatgtacccaaccccataaatcatgagctaagtttaaataggtcactaacagaagcagagaacagcaggggactctagaagcttattttaaaaacaagctatttctattatagttatttggtataatctcttacacataaaaagtatcaactaaaaaatgatcatctataaaaactatttctgattgtatctggctaatttactgtctcttaactacaatctctggaatgtgaaacctgtgtaatacttcatagacaatttcccagttacagacaattccccaggtgcacagacactcaaaagtaacctagaaatatgttatttgagactgtcttgttcactattgatttcagtgactaaaacagtgattgatacatactagtcaaatgtttgttgaataaatgaactaaaaataatacagttaattttaactcctccaatattatatatattttactacatcatttaaacaaagttaatatactaataaaaattattttcatacatttaactagaaaaaaggttccttaattttatctccttgtacaaatgagtgaaatatatgcctgctgaatgaaattctcattactttccttcagtcaatcacaaatcctgagggatcaaagcacagtaagaacaatgagctcagtttgcagaatggaattactctcaataaagtaggcaaccaaatcacatctaaatacagaaaacatcaaatgctggacttccaaaactgagaaaagaaagctgcttgatctgagagggaaggaggaaaatttgtcttttcccactatgatattttctgccaaatggcagctacttagtgaaaacatgtctgctgtgtttctttatatagatagcacctcagtttaaactgaaggaatatggtttgccagaatttcacatgctttaaatttcagttttatcagcatttcataattaagtaatgacataaaactgggagtaagtctcctctaaaatcgtatgcttcatcatttagaccagaaaaaaattctgtttaaaaaaatctaaccttaaactgttcttccaacttctctcgaagagggctcaacttttccaagctcttactcaggtacacatgaccatggaatttaataaaggccttgatgaagtcagaaacaccccatttggttttcacctcatcccggctgaaatgaaagaaaaactttcatgaatcttaagcagcaaaatggctaaaacgtcttacaggagactttgatttgcaaaaacacattatttgagcacctgtgcctcagggagcagactgtgctctcaatgacttttcaactgtaacatgctcagatgaattagtactcagcagcctgtactactccactgggaacaactcaagagactgaccggttgaaattcagtggcgactacaatgcaaaactgttgtaatacatatgtttagattttaggcaaataggagagacaggaagcatgagcaactggccattatttcttgtatgcccaaatttgagtccatttggaaaagtcaaccctacctttccagtgctttagaaagtgctttttgtagattagtagaggcagctgggaaagggaacttcacagcaatgcttctgcagtagtagaaaattgtagtcagatggtctcctttggaagaagctaagatagccaactgattgtaaggctgacctagaagagaaaggtaagattctaaagtaatccaagatgtgtgaagtcttgctatcacagaatgcagaaggtcagtttttaaatctctgtattaacaatggggagcattttataaagtaaatctcatgactagctcattaaaaatggcctagtagcacactttggtgatggcggataggttaaaaagtcctatgattagggtggagggcactctaagttcaaataagactttggaaagggctagacagtaagtattttttgctttgtgggccagtctctatcacagctactcacctctgccaccgtagtgggaaagtagccacagacagcatgaaaaggactttcaatgtggcttaacaagaatgcgtatcaccaaacacctaaagtaatttaatttaagaatcactcctaacgcccattcagggagccatcaaaagacaaaagcattatctttttgtagtaagagagaatttttctaggagggaaattatggtattaaaattattattattattagggaagccagttgttgaagcaattttagatcacattagaggatattctattcatagtgctttactgacaacagtaatatttttatttccaattacacagaatgtacagttaaaaggaaaaatacaataatcaataccaaaacagaaaatatcttttggcttcttaaaggagccctgaactatctattttccatttttctactgagagaaaagtgtcataagcaactcaccattggaggggacaagctgagccgcatgcctatagtaggactccgcctggctggtctggtttctgtatcgagctaagaggaaggaaagaaaaagctcagcttaaaaacacacatacagataaaaacaaccattagggtaattccaaaacagttacagtttaaagatttaaagttaataaatacattaaaattaaattaaggtgattaaagacaaaatattttaaaacaaattaactataggattacgtgtgaagtgtccatccagccttccctacctgggacattcagcatgtgaccaactttaaagcttacctaggccccattttcaggtcctccagtgtcatgccatcaccagctcccactacggactatgctggtgacctggggccggcccacaagaaggggtgagttatatggcacttaaaaacaaaacaaaacaaaaaacactatacaatatgatctgaaatttatgtatttctttaatatctttataaagtgattttgaaaaatgcctcagacctattgaaatattatttatgtgtgtgcaaagaatacactgaaagcaaaagcaatctagatatactactactcgctgaatctccctgtagaaattggtgcttactttgatgtgacctctcccggaatgaatgacatcaagaaatctaaaaatctctgaacgtaaatccactccttgttatttgaggacagtcaaaacataatcctatagttaatttgtttcacaaccctttttaggtcaccttaaaggaatgaacaagaatatatatattatgtaacattcccagataaaatatataaaatggaaatacaaactgaactgtaaaaagcaaacaattaaaaatgaacttttaatgcactggtaggaagaaaagaaggcaacccagcttcaggaggagtaatttttataaactccacaattccaaagaagtagtctttcagaaaatactgtggcatcactttgaaaaattaagctttgattacatttttgctggtttattatttgcctacatctgcataaaatctgaatatgaaagttacttcctttaagatcctttgccaatctcaaagcattcagaaaatcaaagtttcttaaaatacattttatagttttctctcatgacaatctaagttgtatgtgtatgcttgtttaaaagaaaataatctttctatgactactccaaagaaaagcatgaatgtattatcaattccttcacaccaagggctcaccaatgtctccaaggtgaacgaggcagtgctggcagatataggaacaggagctagactgtggcttcactatggcgctggtatgcgtctgtttattgctgataattcccaactgggaagacttcacacggcatggtaaatctacattaaacactgtacacagttcttgtaataactgaaaggaaaacgtgagcaaggattagtatttaagtcagagtgctctaacagtaatgttggtatacttcaacatgtgtaatattacatactgctaagacctaagataggacaacctttcataggataactagtaacattcattacaaatcatatcatttcacttgccaagtattagagcaatccaagatgtacatctaaaaggaactgcagcaatttagggaaaaaaaaagattttacctaagtaggctattcagattcattcagcaagcaactccatgaaattacctctctctatatatattttgttttcctcttagaaacacacaaaactcattaaagactagttggttacaaacttgacttaaatacaaaccaacatatttggcagacttcaggagtttcttgagatttattttcttaagctcgaggtcaaacttgggtctctgcatacacagatctacacatctgtagagatctggaaggaacttttgacattatatagacatccactctttcttcctttcttctctagttttatggtatgagagggttccttctctcactgagaaataacttctctgtctgagcatgctgtttcattcttttctgccttctgcctgtcatcctctcatttttaaaatctacttttaacttatcaaccttctttgctatggcctatgaaatgtagcccacaaaaaataaacaataattattactataaaacaaaacacagagaacggaagcactttcccttgactctagatttctcctttagcaagcttttaatgtcgcttcttcttctcaacagaattccttcaaaggagtccacaagtatcacatctgctttctcaatccctagtcgctccttggtccattatgatctgactttcacacaacctctctgctccccatcccaccatccacaaccactctactgaaactgctgtcaacgacttcttgttaaaaataagcaaatacaatggatgtttcctagccatcatcctagtggatctctctgtcacattgaaaacagttgattttatgactgatcactaagcttttctagttctttttttcttgcccatcatttattttcagtgtccttcattcaaaagacttttctccctccacattaatagcctcaagcacttaattcttggccctccacacagctcttcacattctactctcagtcattcaaatatttacttacaagcagatgacaccacccttatggcagaaagtgaagaagaactaaagagcctcttgatgaaagtgaaagtggagagagaaaaagttggcttaaagctcaacattcagaaaacgaagatcatggtaaccggtcccatcacttcatgggaaatagatggggaaacagtggaaacagtggctaactttgtttttctgggctccaaaatcactgcagatggtgattacagccatgaaattaagacgcttactccttggaaggaaagttatgaccaacctagacagcatattcaaaagcagagacattactttgccaacaaaggtccgtctagtcaaggctatggtttttccagtggtcatgtatggatgtgagagttggaccataaagaaagctgagtgccgaagaattgatgcttttgaactgtggtgttggagaagattcttgagagtcccttggactacaaggagatccaaccagtccatcctaaaggagatcagtcctgggtgttcattggagggactgatgttgaagctgaaacgccaatactttggccacctcatgcgaagagctgactcattggaaaagaccctgatgttgggaaagattgagagcaggaggagaaggggacaacagaggatgagatggtttgatggcatcaccgactcgatggacatgggtttgggtggattctgggagttggtgatggacagggaggcctggtatgctgcagttcatggggttgcaaagagtcggacacgactgagtgactgaactgaactgataatcattcaaatacttggttattgtatcacacacccgtggaaaatagggacacagagataaataaaaaaatctgtgcttaaggagctcacagctaaatgagcaagacaggtacataaagtagggaagggagagtaggagagacgaggaagagagagaaagatatcaaacacgatagcataaaccaacggaatattctatgcctataataagtttcaatccctgggctacgtgtttgtctcacttaatccttgtgataaactagtagcaatgcaatatgttgcttcaacacaggtatgaagctccatttttttcagatgagggtatgaaagcaacaaaaatattgagttatattacagaattagaaatatcttgattcaaataccactctatctaataagtacagatttcacgaaacaaaataagataccttgggggacccaactcagaatgatatataatatctcacccttttcctaagataaaaagcacctctataaccaaatataaaatcctatattcccttctcacgaaacacaggggttgtctacaacggtacttatacctgtacatttgcaatgtgcaagaaatttactgacataaaattgagcaaacaaaactagtgcccagaatgaagagagtctgaaaatagaaaaaaaggaacaaaaaatgggaaaaaccctaaaacagattctgtggaagacagcaagaagaaacatgacagaggataaacaaacaactgaaagagcagactggaaaattaggcacagttgaatatctatagaagaaaaaaaggatgtttaagaaaagtaaatcaagtatggttcaaacttcatgtggctgtcttataaaatttttgcctgaacccaggagttgtaggtagagatactgggaaaactcctgctggttcaaaggattccaggtgagaaagcacgagctgaggcagaagcaaggtgagactaaagagcaacagatgtgtaataagctgaacaaaactatatttggcaattattctgtgaaaactctattatactattccactgctccttagctcttcaatctaccctaagaatttagaactaaatatgaatacacaaggattccctcatagctcagttggtaaagaatccgcctgcaatgcaggagaccccggtcgattcctggctcgggaagatcccctggagaagggataggctacccactccagtattcttgggcttcccttgtggctcagctggtaaagaatccacctgcaatgtgggagacctgggtttgtcccctggagaagggaaaggctaccacattccactattctggcctggagaattctatggactgtatagtccatggggtcacaaagagttggacacaactgagcgactttcacttttcactttcactatgaatacacagaatatcttattaattactacagatacttaatgctttctttttggctcccatttcttaagagtaaggactactctactgttctgttttttcatgttttaaaaaaacccatacggcatactgttacatctttacttcatttggcaatttggttctggtttgaagcaccatgctttaataccaatagttaacaaaacgatatctaagtcaaaatcatcttcacagaaaacagaaatgaggataatcatgttatcagtctctttccaatccattgtaatcagatttctatctcaaccactcaatttaagtcaaattttgtcaaatccaagataccaaaaactataagatgaactattatttatgtaacagaataaaaaactgccaattaaatggtgaactgaccatcttttgtaaatgtatccctatctcagaggtgttaaaatatgaaaaatgttttagaaatgaggaaatatggtatccattaatttcactaatgacttctgtgtgtcaaatccaactgatcctttttaatcaccttacttgatatctttgtagcactcaactgagttggtcactccctcctcatagcgaaatgcttttctcttcgtcttctaagataccactctgatttactcctactgaaatgtggctcctcctgtgccaaacctgttcctacctagttctatggttttaaatgcaaaaccctaatgtctaagtcagggtactttattgtaatcataaattttattctggctccaaccttttcactgagctcctagcttagcttatcaaattacctatttgacctctccacttatatgtcaaactggcatctatctccctagtgtagcatgaatacagttgtcttttcctcagtgttccctatctcagtaaatggtacaaccagtcaactagccactcaatctgataacttaagttacctctgactcttcccctatcctgattccatacatctgatccaatccattaggaagtcctggccatactttaaaaatccatccatatctccccatcaccacagcagcacaccatctgccttcccttcctgacccctgctacatcaatctccaggcaacatccaaagtaatctttcaaaaatacaaattttatcatgctattcccctgtctacttcccaatgacttgcaactatacttcagattaaaattcaaaactcacctgagtctataaagctgtacaatgatttggacctggtgtacttccccagtctagtagcttaatctgtaccacatgtcatcaaaaaagatgtacagaacattattgtttacaacaccaattaactgtttcaattatcaagtcaagataaccaaaaaaaatgttactaacaagttctattaatgttgagatctgaagaaagtttactgctgctcattctatgactggtgtaattactcgaccagggcctgtggaatgcagtgggggcaagagcaatacttactacaaaaacttcaaaaaacaaatttcaaaattagattatttatatattttcctttataaaatactttcctttataaaacaatattttgagacatttaatgattttattattgacttgcttataaaatgtctttgcaaataacctgctacctcaacaaaaatgattcctgctatacttccttgcagattcatttggatttatcagtatccaatcgaacccttggaaatgtgctccatgtgcgtcacatcataaaaaaaaaggttaagaatcatttttcaagatagtctatgtaatggctaatataaacatgtactgcagaaggtggatactctattgggttggccaaaaggttcattctggtctttctataagatcttttggccaatccaatacctccaccaagtctctactgctcctcccgacttcagctgtgttcacagtttagatttccactacatggaggagatgtaggtttgtaggagatttaggttggagatgagactggagttttaaaactagactgtttattataaaaacctaagagcaatgagaatggtacaaaatctgcccaaaaggttatgatgggaatctggaattgaaagaaatatagttgaaagtagtaactggggggtgtgttatgctaggaatagggagacataccatttttgttaataccccattgagctgagactattcaactaacgtttagagtccaactgtatacataattttatatcatgatttttcatttaacacaatttcctgatcataaaaaaaaatcttcataaacaggacctgctgctgctgctgctaagtcgcttcagtcatgtccaactctgtgcaaccccatagacagcagcccaccaggctcccccgtccctgggattctccaggcaagaacactggagtgggctgccatttccttctccaataaacaggaactaattaaacttaaaagcttttgcagagcaaagaaaactgttaacaaaatgaaaacaccacctaccaaatgagagaaaactgataaggggttaatatccaaaatatataaactgcttatgaaacttaagatcaaaaaaacaaacaactggattaaaaaatgccagaagatctgaataaacactttttcagtgaagacataccgatggccaataggcaatgaaaagaggctcaacattgctagtcatcagaaaaatgcaaattaaaaccacaatgagttattacctcacaactgtcacggctatcatcaaaaagatcaccaataacaaatgctgatgaagacgtggagaaaagggagcccccatacactgctggtggaaatgtaagttggtacagtcagtgcagaaaacagtatggcggtttatcagaaaaataaaacagaactaccctattacctagcaattccactcctactcctgggcatataaccgaataaaacaaaaacaaaacatacatgcacttcaatgttcacagcagcattatatacaactgccaagatatggagacaacccaattgtccctcaacagatgaacggataaaaaagatgtggggagtgtgtgtatccccacaaacatacatgtacaatgggatacgactaagccataaaaaagaatgaaaatttgccacctgcaacaacatggacttggaagagattatattaaatgcaatgtcagatacagaaaggtaagtgcctgtacgctatcatttacatgtggaatctaaaaaacccaacaaagtagtaaatataacaaaaaaatgaaatagacgcacagataaagaaaacaaactaatggttaccagctaggaaaggcaaaggaaagtggagaggtagaggtaggggatgaagaggcacaaactgttatgtgccaaataaataagctataaggacacattatatagcacagggactataaaccaatattcataattagtataaacagagtaagtgtttcccagatggcactagtggtaaagaacctgcttgctaatgcagaagacatcagacaggcaggtaggtttgatccttaggtcgggaagatcccttggaggagggcacggcaacccactccagtattcttgcctggagaattccatggacagaggagactggtgggctacagtccatagggcgaaagagagtcagacatgactgaagtgacttagcaagcacacaggcataaacagagtacaacctttaaaaattgtgactcactatgttgtatacctgaaacttacataatattgtacaccagataaacctcaattaaaaaaaccttcataaataccatttataatagtttcataattccattttacagatggtttataatttatttaaccattactctattgtaggatattggtgttgcttccaaattttagtatttgaatataaaacctatttgttcctttaaattgtaattattaagtatctgttgatctatggacaaacgcacaaagaaaaacctgtactgtaagaacaaaaactatgtaacttctgtatttcgaaaaacttcaaacaaactgaaaggacaagaaattggagaaaaggatgtgtgtcaaaaaaaaaaaaaaacaagggaagaaaaattaatatccctgtgcagaaagagctcacataaattactatggaaaaaattagagtttgaacaatggatggggaaaataaatgattaaactgactgtataaaatacaaatatctaataaagaatgaaagaagttcaacatcagtagtaactagacattaaattattctccatctatgaagtatcttatcaattaatcattcatttgcctttactgaaatacttaatgctgttgagtgtgtgtcaagatagacacttgcatacactgttgatggaaatttaaaaacataaaatgataactttctgggaaaacaaaagtgattatcaatagtgttaaaaactgtactcatcagtaatttatcctgaatgagagggtaaggaaaaatgctttgactttttataattttcaaatctcttggcattggtatgcattttttataatggaaaagccaaaaaaaagtatctattaatatatccatctcctcatttagactggatagtcctttgaaagttaaaagatggtctctcttccctctaatcctctgtgtctagtattgtgtcttacaaagaacagatttttaacagttacttgcagaatgaattaacctttaacatctaccctaaggattagtcaagtcaaaccacaacccctctccccagaaataccaacttttgctaaaagctggaagcaattaaaaaatgaagtgtgagaacaagaaccatacttgagttctttcaatgatgaacagtgatgaattttttagtctaagtaaatctataagatggcagctatttgatatctttcaacagtcttttctaaacagcaaaaccaaaacagacaacatataggtgcagtggtcaagcagcagcacagaaagaaggttctgtgaatttctttggtgcaagctcctcaaaatgttgccttgtcattgtaagatgagaatttatacacattttattaaattatgaatgctattataagtgaatgggatgaagttttcaaaggagttctgcttaaataaaattcattgtccaaaaagaattatttgtctgtccaaaaaagaatcattctacctcacgtgatttagaagtcatatcgagatataactaaggtcagggaaagtttctgagaacagtaaataacagcttattattcaaactgagcaaaggctactctatctcttaggtagcttaacagcatttgaagctccagatatattctactatatacttaatactagagaaactcatttgagatcacagtttgactttcttacctggcacaacatggctgttaaactttcttagtgaccatacccatacattcacatttgctctaatgaagcaaagtcagttcacttgtaactgtacttctgcagcttcactaaggcattgctctccatacccttttcctattcatacaattatacctccaacctttaaggtgaaccatcaccttttaaagagcagagtctttactgttttaaaagtcttatggtaaataattttggacattttttaaatttgagattacagatgatcgactcctagacgcaccatactatgggtacgtaaagtgcctatacaagtaagatgtgcacaaagggaatgttcaccactgatttttaagaaaactggtatgtagtgccaaactcacctgagtatagaagccactagctgcctctaggaacagagaaaggtttgcctgaacttcactccgattcgggtttgctcgattctttgcctggccttgtagtgttgtgatctgattcttaaaggcatgattccagctgaaaacaaaatgtaattctatttggtatagcagtgactcactgggcagacactggtccccctgagaacaagaaagaactgtttgttataattataacacactagacagtaaacctgcattaaagttattcacttaaataactttatgctcccctttgaacaagactagacaagcagcagaatgcaactgaccttagtaaacacttaccaaatgttcgaataatcagactgtggcttcagttattaatcttttagggttactagagttagaacctacttaggaatcccggtacaaacttagaactacagtggtaagaccaaagtaaaagtaagctattaacaaattttcatacattttatcattgcaccaaaaaatgtcttctatcaagtggcatgcctggggggatggggggatggggggatggggggatggtggcggtggtttccttataaatattaagccatatttcttatttctctaaaacttatttcccacaacacttggttctatttctatttaatagttttgtttctcttggggttaatatttttgctaaagcttgaaatataaacttatttttgacatttcagttttggctattcaaactaagaaacaacacagcaagtgctgaaatatggcataccaaaatcctgttataaaatgcctttcattcattaatcaagttgtacagagagtcattttaaatttagttatggtgaagtacagttgctccctaatttggaaatcacagggggaaaagaaagaaacgaacaaaaaaacagaactaagaaggaaggaagatatactggcttcattaaaggatgcaaatatagataaagggtttacaacctacctggaaagtacctaattctttatcaacggcagcttttgagactcttttgaagcactggggttttttaatgatttctgagggcaatcactccctcagcaattttgatgccatcttatccatgactctaatatcaaaaatacgcgtttgagtggttgtgattaaattctattactaggtcttctaacaatataaaggtcaggtgtgcaaaaatcaggaaaattagattaggaaaaactaattttcaccacaacttaggtaaacagaatattcttgatttttaattttccaccaggctaatgtccttgtttcaatttataaagcaaggccttccatgaaaggaatttatttactcacttgggaatctggttatctgccatttcacagctcatagaaagaataagtggaatagcctaaatacgtaaaatttttcttagtcttgttggggagtgggggaaggaaatatctatttatttgattaaaaggaagaactttccttacaatttattttcctttgggagagatttatagaattgcatttatcaaagaaagcctgctctgaacacttccttttttaaatcatagcttaaacacaggactgaatacaatatagagaatccaaacactatttcttagcacttgaaatatatacagatttgtttttatgatatgccctaaacaccttaataaaactcaactcggaacatttctctttacaccaaaggtcagtttgttcaaaacatcacaaatattagaatttcttttttttcccattgagatagcttactctgaaataggttaaaaagaaacaaccaaattgttctcttctaaagtctcggtgagattcttgatcttacagggacatcccaaatggtaatacttacagatcctgttctactttcttgtctaaagcgtattccaaatcagtaacaagcattttctggtacaggtcctgcagagcctgcctggatgtccagacttcagctggacccagcttagaatctgagtaacaaaacaaaaacagtagatagataaacagatagttaaggccattacgccacaccaacaattccttcactctctattcaccaaagcaaaaacccgctttaaatacatatcacagactgctccaaaagttttatactactacatttcagatgaaactttcaccttttggctaatgattgactctttcaaaatacttctgtatttgtcttttagttttgaaataacaccatgaaatgaaaaaggcttaaaaataagagagagaatgattcaccctttgattttggtatggataactatgtatttacaccacaggaagtcatatgcctcataagaagtcaccccatttgaaacggtggactgccaagttgatctgtttactcttacattaataactgtatctctttgttcaaagaagcttttcttcttcttttgaatcattctcacaattgcccttacagaagcctcctgtcagctcacaatccagcagttgtttgagcattctgctattactcctactttcctactttgccaataaagtcttgacagtgagtgttattttaccaatcggtaggctgcttgtcaagacacttttgtgagcaatacgtacttgctatttaatgtaaatgagcagacaagtgattaaactgctcaagaggccaaatgagagactgggtgcaagatgaaatcaggaagtcaggctatgactacatgtaataccaaactggggctgtattgtctgccagagtcctacaaggcacattagcctttcctattactaggcttataagtgcaataactgatagtgagctgcctcaatagaagaacttaataatggacttttcaattatgtatttctgactgctagttagcctgtctggttgcatttcaaggttttgcaacggcatagtcttcactcctctttaggtttgctattagtatctacaggcaccataatcttattctgcacacagaatctcccagatattagagttaatcctcaagacagtctgctagaaactaaaatatagggtctattttttggtatcaggttcttggccccttattaagcttttaatgactaaataaatagatttatagatttattcaactctgcttcaactcatcggctgcagagaaaggattttaaggtatcattaactctgacccatcagagagactagcatttgaatgagcagacttaatatcttagggacaagtcaccttctgggtacaacagatgtaccccacaaaagtcaaaccctaagccttcttactgagggtattcaagagttaagaaaatgtaaaaggtatatggactgcctgagactgctccatatataacttttatcacacaatgcagattacaatgccaacacaaagaggcataatagagcagagcgcagagctgaccccggtagccacagtatggagggtaatgacagctatgttaataataggaagaactgtaaactaagaaaaagtgatttgggcctttttttctccttgaacaagatgacagtgagattactcaaaattcttagaatactagcctgcaattctagaaattgagaaaaacatatccaaatagcccattgcctcttggttgtaaattttagcaggtatgcggtttacaacaagtttaactctctttgtgagtttcactgcagaaccaaaatcttcaaaaattagaaagagatccactagcacctacattttttaaaacatttcagcatagttacacagaaagcatgttgctatcatgctgtaaagagaacactttgaccactacatagctgctgccatgtacttcctaattttgcgttcaagtcatctgctccttttagtggctaagtctaattattgtttcaaaaacaccttggctattattgaaaacaaaaagttaagagagaaaagtggcaaggtagctcaacttcaaggactttcaatttgcaagagttttcctgaaaatatttttctctgaaggcttatttactatttaggtttggggaattataaacaggaagacataaacctaatgttggtacttgtatttatatggtagactattttgagccatctaagtaaaaattcaaactataaaaacaataaatactgaaaaaaccttttggcaaccaggacgatactacaagtagtataataagatgacacacttctcttaatttaatggtataaaataagttgtgaaaaacaaatgagtcagacagtacctgtcatgtcagccttcaggacttctgcctgcctgaaaaagggaaaaagaatatcaattagaaacaaactaggcctacccaatgtaagtaacactaaaagttaagtaaaatcatatgacagtaagaatgtaaattaaaaaaaagaatgtgtagcagctctatttgtggcactgcaaacagtgaccctgctttaacatccagaataataagatctcagcaaaccgatgtcactgcttagtcgttcacagggtcagcatgaactcttctaccaagtagggttcactttcttactgctactcccaaatccgatacatttaaagataacatttaagtgacatttattaaattaaaatttttctgtcaatgaggccagaaaattctgtgtttctcaattcactagccactataactattttaaatctccatcctcctcaaggtgatttctgccctcttcctcagtctcaactcttttcagcataggacagttccattcctcaggaaaacaatgccctttctaaaggcttactatattcacagaaccctctctttcttactcttgttaaaacactagaggaagcgtatgtcttgtttaagaccagtaattccacttaggtatgctctttctagcctttgtaaaaacttctgatcctttaattaccacctgccctctttcaataatttaaaaagttccctctctattgggtgcttctcacagagtatttaaacatgccctacactttcacagactttaaaatcttctatcttatattctcatctaactgctgcttcttttctctcttcccaaattcttcaagaattgactgtattcaagaaatgaactcatgatcaacctccaccttcatctctggtttctctttctagagttttatacattactaaatgtatcatggcttcccagctgtgaaaagcagacaccgggaagtcatccatgacaacattctctcaaatccctgataatctatcaatgccaaataattttacctactaaatacatcttgaatctgtaattctccctttacttctttttcagtcactatcattcaagttataaccatccattgcctggactactgcaaagccaccaaatctttttctccacttcactcttgtctcctttcattctgcttgctctactgctatcagagggatctttaaaacatgcaaatctgacctcatcaactgccctcttaaaaccttttaatgatatcccactgcttttagagtgaaaatcaagatctttagtaaagtggaccacagagccctctgcactctgaagagagcctctgtactctacttctataattattctgttctctccttgatccttttgctccagtccctggacttctttctagattctccaatgtgtttggctcccttcacactcaaagcctttgtaaagaagaatccctttgctagaaatacctcttccccactttgtctacttacttactcatcctttgtctcagcagacattacttcccgaggaagctttactaaaaccctacatatgtgtgtgttagtcactcagtcgtgtccgattctttgtgacctcatagactgtagcctgccaggctcctctgtccaaggaattccccaggcaagaatattggagtgggttatcattcccttctccaggggatcttcccaaactagggactgaacccaggcctcctgcactgcagccagattctttaccacctgagccaccagggaagcccttgaaccctacatacatgaaacatattcttgtttcatattctcaaagcacttgtattttttcttcatagtacatatcacagattttaatgctcaccatcacaattcctatgcctacacagtcggcattcaacaaatattttttaagtgaagaaaggaaaaaggctaaattacagtcatatactataaaaaggtaagaatataaagttaagagatctccatttttagaaacaaaatctgacataaaagttagagaacagagactcttaaaatttttactgtaaatgtttattatttaatatcaattgtgaattttagtttcatcaaaatataacatgaatcttttttcttagctttaaaacatttttaaaatattttttaaaaattaagctttcaaatataacagaagcataataggatgttataaaaaccacaagccatatgagaactatcactataaatgaacaatttcaaatacacagctattaagtgaactgaagtcgctcagtcgtgtctgactctttgtgaccccatggactgtagcccaccaggctcctccgtccatgggattctccaggcaagaatactggagtgggttgccatttccttctccaggggatcttcccgacccagggatagaacccatatctcccgcactgcaggcagatgctttaacctctgagccaccagggaatcccaatacacagctatacttaatcctaaaaaataacatcacatcaaattacattatccattcagcctagttttactgtttgctttgagtgctaaacttttgccattaaaaaaaaaaaaaccaacacttcacaaagtagttgatttatgtccttaaaacctaagatcatatttagaaatgcctcacctcttaacctaccagtgtcacaacctcttctcctttcattctgagtagccaagttactaaggatatattttacaatgtatccatatcctggagatccaaccagtccatcctaaaggagatcagtcctgggtgttcattggtaggactgatttttgaagctgaaactccaatactttggccacctgatgagaggagctgactcatttgaaaagaccctgatgctgggaaagattgagggcagaaggagaaggggacgacagaggatgagatggtttgatggcatcaccaactcaatggacatgggtttgggtggactccgggagctggtgataagacagggaggcctggcgtgctgtggttcatggggtcgcaaagagttggacacgactgagtgactgaactgaactgaagatctgcctaaagtgaagtgaagtgaagttgctcagtcgtgtccgactctttgcgaccccatggactgtagcccaccaggctcctccatccatgggattttccaggcaagagtactggagtgggttgccatttccttctccagaggatcttcccgacccaaggatcaaacccgggtctcctcgcattgtagcagatgctttaccatctgagccacaagggaagtcccaagatctgcctaatgaggataccaatttccaatcaaatgaagattatattgagcatataacaggaactatttccaaataatctgcttctctgataggccatcagtaagagaaaaactataattctaacagattctggaacaggcctccactgataaagatcaaaatttcactatgtatttttatataccatttttatataacctgtccaagaaatataaaactaaaaatctaaacacaaacaaaactgcaaaaatgtaataaaaactatctgacatgaatgtccaaccattttgaaatttcaagacttttgatacctccagaatgactagggaagagatgctcaccgctgagcacagttctctgctaggttctgaaagagacacgtgttaatgactaaaataactctgctaaactgaaatggtaaagagagttaaacagaaaataaaaccgtgggcgacagccactatgattcccatcccataaacaaggaaatcgaatctctgacatgtagaaataatctgtccattatcacaaagcaactaggtacaattaagtaaacttagtctttctgactctgaagttcaaattatttttatttcaagttggaattaaaaattctatgacataaaaagctaacacagacttatctaggttcagtttcgtgctctgttgattaaatcttaacatttaagtcaactagtctaaattgaaggtcagttcacaaaaaataaaaaacaaaccaaaaaaaaatcagttcatattaggaaataaatacctgagatttctaccagaaagaccacaagaagtaaaattcatattctcatgcagtggtcagactgtgggtaaaatttcctccttcacaatggatcaatttttgtaaatacatgttattggaacagtcttgcctattcatttatgtatcatctatggctgctttctgctacaagagcagaggtgggtagttaagataaagactacatgtctcatcaagcctaaaacagttactatcggccccttcacagaaaaggtttggctgtcctgctccagggagtaagtatttgatcaaaaacaagaagtcgatatgtataaatccccaaacaaacagttttcccatatgaggagtcatcaataatagtctcctcagaataaagatttttatttgttgacatcataatgtcacaaagaagactgtttaaaaataagtttttttagatggtgtacaatatataagaaatcaacagatatgtgatcttaaaccaactgctttcacaaacattagcacaaaattgtctacttattttactttttttataaacagaaaatactatacctcaatgacctattggttttgttaaagatcaatattattaaagattaatactacaatgcttatataaagagatactaattttcaaaagtttcctcttggcttctagaaggtgtggccacatgaattcttttttattcttactttaagttgaaagaattaataaaaagaatgaagaatccaagaattaaaatcatcatgccttcagtaataaagagcagtatttaaaatataaagctttcaaaatactaaatatattgtctgtttgtaaataataaaaattaagcacttctatcaaacaagaaaaaagaaaaagccatttaaaggctaaacaaaatctgaaacattcagcgataaccaaatatgtttaaagccaaccatctgaaacaatattcttggagaccatggctgagaatcactatctataaatacatttaacacattctaatgcactgctgctgctgctaagtcacttcagtcatgtccgactctgtgcgacctcatagacggcagcccaccagactctgctgtccctagattctccaggcaagaacactggagtgggttgccatttccttctccgatgcatgaaagtgaaaagtgaaagtgaagtcgctcagtcgtgtctgactcttcgagaccccgtggactgaagcctaccaggctcctccgtccatgggattctccaggcaagagtactggagtggggtgccattgccttctcctctaatgcactaggtacactaaaatagctaacactatatttagcacttattattgccacattgttctaaagtaagggtttgccataaagtaatcatttaaccctcactatgtactattactgctcccactttatagctgaagaaacctaaggagatagaggttaagtaacatgcccaaggtcatcaagttagcaagtagtagaggcagcaattcaacatactgattccagaggctaactcctaaccactgcatcacagttcttctcttatacaagattgtaagggggggggggggggcgcggaatgtttgacaataaaagcccagagaactagggctttcaaaaattaaacattttacagtaattttttttataatgtcactagaggaaaaaactacttaatggtaattttctttaacaaatagcttgattatacataccactgatacaacaatgcaaggtaacgaatacagaataatctctcaagatcacacattatattcatggcttaaaaatatacaagatatttgcaagttaggggcaaatacagtgggggattcctttcacctggacgaacccccttccatctctgagaagaacacaggaatgtataagccaatgtcctctgaactcacagttgaggagaagtgaattagtctcttgttttgggaggcaacactaatttttttttttttttgaaatttaataaaagccacagcacatcttatttcaagataatttacttatttccataaagtactaaggagtattcaggatacgagtagccatcagttatgaccataaacataataacctgatgataattatttgtgttaaataacaggtcagagagtagacactagaaggcaagtatgtgcttacaaacgcagatgcacacacacacacacacacacacacacacacacacattcctgagacctttaaggtaacatcaaatctcacggacattcctgagatctttaaggtaacaccaagtctcacggtattcagttcagtttagttgctgagtcgtgtctgactctttgcgaccccatgaattgcagcacaccaggcctccctgtccatcaccaactcccggagttcactcaaactcatgtccatcgagttggtgatgccatccagccatctcatcctctgtccccttctcctcctgcccccaatccctcccagcatcagggtcttttccaatgagtcaactcttcgcatgaggtggccaaagtactggagcttcagctttagcatcagaaaaaaataactcgtgctgctctactgttggatctcacatagaaaaataacatctagggaaatgctgctcctaaaggagcttctcagtaagagataataaaaatactaacttgctttctctccctatggcacttcacagtctggcacaaattttcaaatctcctgatactccactgctctatatcacaacattcattcaataatctgtactatttgaacatgtgtacctagtttgataaaggctcaattctggtctaggaatctcaaagcatgagaaggaattactcttccaggcagagacaatatcacacaagaaaaacaaagctaagccagtgaaggaggtagactgacgcatcaatgcagggtaggaagccacagaggagctggagagtcacagcagactgcagacggtgaggccgcggatggcaggttaaggagctcagggtccgtcttttaactactaggaaatctatgctgggttttaagcaggggtacagcattgtcagaattgcctttttaaatgattacaacaagatgcatggaagatgggtttaaaagggcaagactggaggtaaggaagtgaaggaaacgaatggatggaaatgaagtggaagcatgaacggatggaaacgcctagattcaaaaatatttggaagtaaaatcagcagaaaataaagcagaggaaaccatctaaaatcattcccaaattcttgccttgcacatctgggtatctgactaagtggcggtgagcaagcagacatttaagaagagatgagtgtcaagcacaggggagacatcaagactacggacacaatgctggagtgatcagcacacagatggcagttaaaaccataggagtagctctaattgcccagaaaggcagaagggtggtgcgagttccctatcttcattctcaaaaggcagataaaagaatgaagaacaccaagaagaaactcacaggcacaggagggcaaaagaagaggataaacagaagggtagtcagcaacatcacaggcagtagataagtactctaaggactggagggcgtgttggatttagtgcagtgagggttaatgactgccttgtcagagaaagaaacaatgtcaaactgtagggagaatgaggaacaaataagagggagaagtttcagtcaactcttaagacactgggctgtgaagagaaataaaagggggccacggataaaagtttctttttttccaatgggagagacttgagcatgttcagaatgaagaaaagaagctagcggaaatgaataggttgaagatacaggaaagaacaagagtgatacagcatgcttctggaaaagatgggaagacatgagaatatgaaaaagacaggacgcaagactagctttcaaaagaggatgaaattgaaggaaagtagtattagaaagaattgtgctaggaaaatttgggagtggggcagggtggaaagatgtccagagaactcactgctacattgcctcaagttcggagataaagcaggaaatcagaccagtgtctaaaagtaagagggagattaactgaggagaatggtgaacctatgggataataacaaaatgaacaggcaaaagagctgagaaaaagtgatgagtacagtacggatcacacacaacgaaaaaacgtgaaaagacagtgttcaggacgatatccccagcactccgaataatgcctggtatgtcacagctgttcactacaattttgttgaattaatgaatggtaaaatgtgtatcatactaaggcaattttatgtaacacaaaatgatacagaagaaaaaagacttaggtctgaatctgggtttatattaatagtgctaccttggagtttcaagaaacctcatcttcctcatctataaaacagggatacaagctccctttcagagctgctaccaggaataaacaaaacaggtaagtttcatacaggaacttaggtgataactccaagttgttgttgttgagtcactaagtcatgtctgactctttggccatggactgcagcacgccaggcttccctgtccttcactatcgcctggagtttgctcaaattcatgtccattgagataactccaagagagagggttaacctgtgacatgaatacttcagtgaccaccaaattacttttgagtcactgacataggatcctttctgaagcaacatactaggctgaaggcggcaacgttccaaggtagaggtaaaaaatcctgggtcatctatcaccacgtaatgctaagtaacaagagaacctgaatgttgtaatgaccacattctagtatgcacagaaaataaaaacaagagatgaatatgcaaaaattgcaaaggacttacattattgtattttttgtttctcctcaaacattagttttgattatataaaacttaaagaaatacagtttaaagttggatccgcaaacacacttttctcctctctaaacattagttttgatcacacagcttaggcaaacaggtaaaagcctgacacgacagcacatcgagcaaagcatgaattacagaatgccatcgaagctcatctcctaagaagtaagcagcagcttacataatagtacaggtgaccacttactatttgccaggtgcagtttatctgctacaatatactattaaacctttaattctcacaagaaatctatcaggtaagtaactaaagtgctattcccatttttctgatgaggaaaaagttaaataacctgccccaaatcacacaactgggaagtggcagtttgggttccaccctgcggtctggttccagagctcataagcattatacaagaaagcaaggcttctggaatggcctggctctaggtgcctctgtcatggtatcaacttgtagggacaaccagacttcacatttaaaagtctcatctctgaccccaagcaccttcacactatcatttaaactgatacaagctactgtgagaagagttaccagctcactgtgtggttggagagggcttctcttgcacaccaccatatacctatttctacaggcatctagaaggcctgactgtatgcaggctaacaataacagaagcaagaactgaggctccttgtattcaaatgaactgcaatatacgtaatccaaaacaggaatttttattctaaaggatagtccaccacaagataaatcccctctgcttgccataaacattcagagaccacgtacacaaacataaaatttacatttacgttactaaatgtttaaaatttttctttggactgtaagatataaatgcttacgacaaagtaaacacacaaggttcttatgaggctgcataagttaaaacaaaaaaaccgttagcactccctcccccattccggccaatatcaaatgcttccgaaagcttctaattcttctactagtgttcacagtatgtgagtactttaacatatctctaaaaggaatacaaacatgtagaaatcccttgtaatttttatcctacctaatattacttgatttcagatgctcctctgatttcaagtttccggtcctcatctgggacttaaatgaaacgttttctcccacaatgactatctgcaagaacatccaatttctcataaggtagaatggtttaagacattctagatagaggagaggaggaaaatatgagttaacccacaataacagagaaccctcttgaagaaagttaaattattttctctttaaaatgatcaatgtcaaaggcaaaagggaagatatcatggcttttttcctttttatatttagtttctgagagtacacattttaaaattctgttttgtatatatctaaaattctagtttggtatccaactgttattctaatctccctgcctgaaagctgagtgatctctaaaggacaaacaggtatcagttacccagaaaggttcttgtggtaccaaggttcaggagcagatggctggtccaaactggactacatatggaaggaaaaccatgtaaagcaattaaaccacaattatagaagatacaaaaaagcttacattctgagaccaggtaaaaggtaggtatttagatgttcagtcactcaatgaacaacgtatgcatgctaagttgctttagtcatgtccgacttttggcgaccctatggacttgtggcccaccaagctcctctgtccatgcgattctccaggcaagaatattggttgccatgcccttcttcaagggatcttcccaacccagggattgaacctgcgtctcttaggtctcctgcattggcagatgggttctttaccactagcaccacctatgaacccctaatgaataataatttggttatttctctgtactaaacagtgttaaggactaggtagacaatgatgaaaaaaacatgatagctcctaccagatttaaattctaatgtggagacagcccaacaggaaagaggaagcagcagaaggtagtggttaaaggcatgggcttggatatcacactgtactcaatggcatgctgggaataactcaagccacttgcacaatttctttcagataccaatttaacttaaagatttgggcaaaataaattgagtaattattattaaatactgataactgcttacatttaaaattattacgtggcagattctatactaaatgcttcatacactgatctcacagaatgggaaaataaaatgtcatagttaagtatcattttcagactgcctgggttcaaacctcactctgctatttactagctgtgtaactttaggaaaattacttctctatgccttaattttatcagcagtaagaaggagataataaaagtacccacttcattgagatgttttgaggattaaatgaggtaacagaaataaaacctctaggattgttccttgttatataagccctcaaaaactgttattgtcattattatcattataggtattattaatcttcccaacaatcctaagatgtaaatgctattattatcctcattttaaaattaggaaattgccagcctatgtccgatgcaggatacggcatacttggggctggtacatggggatgacccagagagatgttgtggggaggggagtgggaggggggttcatgtttgggaacgcatgtacacccgtggtggattcatgtcaatgtatggcaaaaccaatacagaattgtaaagtaaaataaaaaaataaataaataaaataaaaataaaaataaaataaataaaattagggaattgaagctgagaatccacattaattgattctagaatagaaaacaaagttattcataattttaaacaataaaacatcaattattaagagaaatctcaaacatgcagaaggtctatgtagactctggctccatacttccaacacatatatttaatcacctgtgactttagttgtactttagtggaaaagactaggagaaaatacctcatgacaaaacctaagttcactggtacagcatgttaagtctcacagcttccaactatatatgttaggacccaataaaaccaaattacttttagttccctgctattttgccccactgcatcttgattcatgctttcactcaacctgaaatgcctttccccttccttctttgtctggttaaccccttttggtattttaagactcagcaactcctgtaagaagggacttggcttggccaagccttcccaatgaatcttaatgcccacttctataacagcactcagagcactatgatgaagttattcattcactcatttcctgcactagaattatttattctattagatgatgtaggccaggatggtggttttcaacactatgcttaaaaaaaaaaaaaagacattctttgcaacaatgtttttatcttcctgaaataaaatacaagatgatataaactatttatttaacacgttacaatgaataactaaatgccttctacaaggaaaaataaaaagaaagaaaattttaataataccagtatcacaataaacaaatggttgggtaagactattctttaagaaataatgaagttatcaatgcttgtacataacatgtggcttgtggtatctcagtctcccagaccagagactgaagcccggtcgatggcagtgaaagtgccaagtcttaatcactggaccactaggagttccgttcctatatatacttttaagagaaggttaacagaattccaaagacagggaaatgaaagtaaaaatctgagtagacattagaattaaaatgagtttcaatgtaaataacagccaatcaaatttactggaaatgctaagagaaaaataacctgacatggggacaccatgagtataaagagctgaccttaagaaaataagggtgtgactatatcccttaataggtaagcaggaaactaatattatgttggaaaaagaaacagtaacagttctttatgtaaaacaccatataaatttaggttagggaaaagtaaagtacaacttcccaatctggagtataacatgggatacggacaacttaattaactcagccagcaacagtattaagatactatctgatttaactgaataaaataatctgtacattattatggtatatctagaaatttctacttctgtggtctccaaaatttaagagacataaaaaaagtcaagtctgacttttccacccaagaaccattatttaacctgtacttccagacatcagtttatctagtcaggttccttttttctttattatttacctatttgtctaaacaaaggggtaatgcattataatcaagtaatctaacaaatctgatacaaatcatagagggcctatagtagacatgaatcatacacctcctggcatctgcaccattgtgaactctcttcacacagtgaccttggggttggccgtgtgacttactctggccaatacttcaggaagtgagacacgaatggaagcttgacaagcccttgtgcatctgggctggcccttctgtaacgccttcacaactttatgaagtagaggagacagacgacttggaaagaggacaccccattttcccacctatcacaggcatcccagtcgacagttcagacatttgagtgaggccatcttggactattcaggacactgagccactggatgaccagccatccaacttcacctggagagtctgagagaggggacaccttcggacattctgagcaaagaagctccatgacctaacctcgagtttgacatgttccacggagccactatgtcaagaatttactggcttgaaccagtaggcagcaatggagagaataaaatgtgactggactttgaccaacagggtttgctgagtgaaattttaaacagagagagagaggcaggaatcaaaaatgattcatgaggatttgtcatttactagctaaagataaaagtaggcatagggtaaagagttcattttggacaacaatgcttggcacatggtgttatataaaccacctgctattgttttttacgatgatgataactttaagacattatacatccatgtgaatgtatactagcagttattaaagaatctgacatttaaaggaaagatatgtaaccacagaaatccaccttgggagtcatcagcacaaggcaagaaatgacaagggaataataaaaagacaattaatgaccacagagaaagaagggaaacttgtcgaagttttgcggtgcagtggaagccaaatgaagaaagagcttcaagaaaagaaggtagaatcagcaagtgctgctcatgcagcaggtaaaatgaggcctgagaactgattactggattcagtatgtggaagtcactgcggatctcgttaggaacaatgtggacagtgaagtgggagcctcagcccatggactgactttaatggaaaataggaggaaaggaacagagactaaaactgagtttagatacctttttctaggcaggagaggcaacagagtgagggtcagaagtttttaagatggaatatacattcttttatgggatggaataggataaataacaagaggaggattcaatggaggaaaaaaaaaaacaggctgaaaacaaagtctcaggaatgccagagggggttatacgagtttgtttaaatataatacatttaaaaggctaaaagacccctgaatgaaagaataaaacttgaagtgaattatataaagaaagataactaataatcagtgactacggtgaatggcaagtggattacataaagtgaaagtgaagtcgctaagtcgtgcccgactcttagcgaccccacggaccacagcctaccaggctcctccctccatggggttttccaggcaagagtactggagtgggttgtcattgccttctccagagggggctctagggaggcctgagtaacttcaggacagggactggattacataaaccattctcaatttaactttcatagcaacctgaagtaactactattttctcggttttacaaacaaacaaagactcagagattttaggaaacttgcccaagatcacaaaggtagtaaatgctaggactgaggttcaaatccaagtgtatcagaattccagaaccttgctgttgctattcagtcgctaagtcgtgtccaactctttgtgaccccatggactgcagcatgccagtctcctctgtcctccatggagtttgctcaaattcatatccatttgagttggtgatgctatctaaccatttcatcttttgctttcagtatgtcccagtatcagggtcttttccaaagagtcagctcttcacatcaggtggccaaagtattggagcttcagcttgagtccttccaatgaatattcaaggttgacttactttaggattcacttcagttcagttgctcagtcaggtccaactctttgagaccccatggactgcggcacaccaggctttcctgtccatcaccaactcccagagcttgctcaaactcatgttcatcaagtcactgatgctatccaaccatctcatcctctgtcatccccttctccttctgccttcaatctttcccagcatcagggtcttttctaaagagtccattcttcacagcaggtggccaaagtattagagtttcagcttcagcatcagtccttccagtgaatattcaggactgatttcctttaggatggactggtttgacctccttgcagtccaaggggctctcaaaaggtcttctccaacaacacagttcaacagcatcagttcttcagcactcagctttctttatagttcaactctcacatccatatatgactactggaaaaaccatagctttgactaaatggatctctgtcagcaaagtaacatctctgctttttaatatgctgtctaggtcatagcttttcttccaaggagcaagcatattttaatttcatggctgcagtcaccatctgcagtgattttggagcccctcaaaataaagtttgccactgttcccattgtttccccatctatttgccatgaaatgatgggaccagatgccatgatcttagttttcagaatgttgagttttaagccaattttttcactctcctctttcactttcatcaagagactctttagttcttcttcgctttctgccataaaggtggtgtcatttgcgtatctgaggttattgatatttctcccagcaaatgtgattgaagcttgtgcttcatccagcccggtattttgcatgatatattctgcaagcaagttaaataagtagggtgacaatatacagccctgacatattcctttcctgatttggaaccagtctgttgttgttcatgtccggttctaactgttggttcttgacctgcatacagatttcttaggaggcaggtaaggtggtctggtattcctatctcttgaagagttttccacagtttgttgggatccacatagtcaaaggctttggtatagtcaataaagcagaagtagatatttttctggaactcatcttgcttttttgatgatccaatggatgttggcaaaatcctttaggattgactggtttaatcttacagtccaaggaactcttaagcacagagtcttctccagcaccacaatctgaaagcatcaactcttcagcactcagacttctttatggttcaactctcgcatctgtatatgactactggaaaaaccatagctttgactatacatacctttgttggcaaagctttttaatacactgtctaggtctgacataggtttccttccaaggaacaagcaccttttaatttcatggcttcagtaactgcccacagtggttttggagcccaagaaaataaaatctgtcactgcttccacattttgcctttctatttgccatgaagtggtgagaccagatgccatgaccttagtcttttttaatgttgagtttcaagccagttttttcactctcctctttcaccctcatcaggaggctctttagttcctctttactttctgccattagagtggtatcatctgcctatctgataacctaaacttcacttattcattattccataatacaatacagacctcaattttcaacaattcacatattcaaaattaaattgtgaatatattattgcttatgattttattcagtttggctttttaatagctttaatttttaaagcttttgctcttcaacatagaccattaaaaaaagtgagaaagcaagctaatgtgtatgtgtatacataaacacatacaaaggctttacattcaaaacatattaaagagaactcagtaataagacaatccaatttgaaaaatgggctaatgatttagacactacaaaagaagatacgcaaatggccaataatcacatgaaaaggtgctcaacatcttcagtcatctgaaagtgcaagtctacgagataccaatgcatgtgcgttagaatggtgaaaatcaaagagattatcaataccaaatattgaaggaaaggatgtggaataattagaacccttataatactgctgctgctgctgctaagtcgcttcagtagtgtccaactctgtgtgaccccatagatggcagcccaccaggctccgctgtccctgggattccccaggcaagaatgctggagtgggttataacactgctgctaagagtaaaagaatgttataattgtgttgggaaacagtttggtaattttcataaagttgtacatgtactttctatatgacctagcaattccactcctaggtatttaccaaaagaaatgaaaacatgtccatgaaaagacttttatattacattcctaaagctttattcacagtagcagaaaagtagacacaacccaaaggctcattaaaaggtgaatggataaactgtggcagtcatatgatgaaacagttgttgttcagtcactcagtcatgtctgcctctttgtgaccccactgactacagcacatcaggcttctctatccatcaccatctctgggagcttgctcaaacacatgtccattgagtcagtggtgccatccaaccatctcatctctgtcgtcccctttttctcctgccttcaatctttcccagcatcagggtctttttgaatgagtcagctcttcatagcaggtggccaaagtatcagagttttagcttcagcatcagtcccttcaatgaatattcaggactgattccctttaggatggactggttagacctccttcctgtccaagggactctcaagagtcctctccaacaccacagttcaaaagcatcagttcttcaacactcagctttccttatggtccaactctcacatccatacatgactactggagaaaccacagctttgactatatggacctttgtcggcaaagtaatgcctctgctttgtaacatgctgtctaggttggtcacagattttcttccaaggagcaagcatattttaatttcatggctgcagtcaccatctgcagtgattttggaggccctaaaataaagtttgtcactgttttcactgtttccccatctatttgccatgaagtgatgccatgatcttagttttttaagccagctttttcactctcttctttcaccttcaccaagaggcttttttagttcctctttgctttctgctgtaagggtggtatcatctgcatatctgaggttattgatatttctcccagcaatcttgattccagcttgtgcttctcagtaataaataggaacaaactattgattcatgcaacaaagagaattattctcaaaaacattacgtcaaaagaatctggacacaacaagagtatgtactgtactacttcatttattaagttctggaacaagcgaaagtaatcttttgtgataaaggttaaaataatgattgcctgagatatagagaaacaagtaggggtaggggcaggactgactacaaaggggcctgggtgaacttattttaggatttggaaatgttctataccttagctagggcagtggttagaggtatatgttcatcaaaattcatgactgtgcacttgaaatgagtgtattttcattatatataatgagtacctcaattaatgtgatttaaaacagtatatacatgatcataatctgattaaattcattacctgtatatgcataaaatgcatatcgtattttcacaaaaaaagattggacagtgtgaacagtgcttgtggcaatttaatattacagttttttattgtaacattttaattttactcaatgtataatacccttacaacaataaatgactactaaatatattaatgtcctaataagccaattattaaatattttaaggttagaatgctttctgcatagaaagctttcactagtcagactaaaatcatttctaataaataaatatcctttcccattaagtttaaaagtacttcacttcttccaatctaaacttcctctgatccggcttttcccctccagcatccaccctaatccttgcctctgctgagtcgcttcagtcgtgcccgatctgtacgaccccagtgacggcagcccaccaggctcctccatccatgggaatttatcggcaagagtactggagtggggtgccattgccttctccgaatccttgcctctgctgagttgcttcagtcgtgtctgactctgtgcgaccccagagacggcagcccaccaggctcctccatccatgggattttccaggcaagaacactggagtggggttgccatttccttctccaatgcatgaaagtgaaaagggaaagtgaagtcgatcagtcgtgtctgactcttagcgaccccatggactgcagcccaccaggctcctccgtccatgggaatttacaggcaagagtactggagtggggtgccattgccttctccgaatccttgcctctaaactttgttaaaagacaatatgtaagtactgagttcactttcccattatcccgtcacttttaaactttcaattaggtgtccatctgtaccactgtaacaaatttctcaagagttaacaatgactttgcccaatttaagggccttttctcagtcctcatgtttcctgaactctgcagtatttctcaatactatattgtataagcattctttcaaactttagcccacatcaaaatcactaagagatttataaaatgattgctggaccttatgctcaaagtttctgattcagcaggtctgagacaggacacaagaatttgtatttttaataagttcccaggtaatgatggctgctcctaatctggagaccactctttgagaactactctattagcgcaagccttcattaaagctttctgcacacttagctgaccattcttcttcacagtttcctgacccttcctaccttttggatagatcatttcttgcctctttctgcttccacccatctagattaacaaaatcattaagaatgaaagttaagctttattatcacttggcacctgttccctaagtgtctaaccctgatacccttatacttctataattccttcccatatctaacatcacacacaatgaaaagctaaaagcactctcattacttttattcaacccagtattgaaagtcccagcttcagcaatcagacaagaaaaagaaatgaaaggaatccaaattggaaaggaagaaataaaactgtgcaggtaacatgcatgatattatacagaaaacacattaaggaaaccaccaaaaaaaccactagagcccatcaatgaattccataaagctgcaggacacaaaattactatacagaaatctgttgcacttctagacactaacaatgaattataagaaagtgaaattaaggaaacaatttcatttacaattgcatcaagaagaataaaatacctaggaataagcctacccaagaaggtaaaagacttgtacttggaaaactgaaaaaactgattaaagaaactgaagatgacataaacagatggaaaaaattagtattgttaaaatgaccaaacaattcaaggcaagctacagatacaatgcaatccctatcaaaataccaatggcatttttcacaagactagaacaaataacttaaaaatttgtacagaaacacgtaacaccctgaaaagccaaagcaatcttgagaaagaacagagctggaggtatcatgtaccctgacttcaactatatgacaaagccacagtaatcaaaacagtatggaattggcataaaaatagtcacacaggtcaatggaacagaatagagagcccagtaacaagctcacacgcttacagtcaattaaccaacaagaaaaattggacagctggaaaaattggacagctacatgtagaagaataaaagtagaacatttcctcatgccacatacaaaaataaactcaaaatggattaaagacctaagtgtaagactggaaatcagaaaacgcttagaagaaaacataggcagaacactttgacacaaattgtggcaatattttgttagatgtgcctcctaaggtaaaggaaacaaaaataagtaaaatggaatctaattaaacttaacacattactgaccagagacatattaatacattttttgttacccaaatatcacttattggagtgtttcaatattcaccagctacaggcgttagcttctgcaaaaatcccctggtcaacaatgtgttaaaagcttttgcacagcaagggaaaccaccaacaaaatgaaaaggcaacatacaaattgggagaaaatatttgcaaacgatgtgacccacaagaggttaattttcaaaatatacaaacagctcatacaactcaatatccaaaaaaaacaaaaacaaacaaacaaacaaaaccccctaaaaaacggacataaaacttgaatagacatttttgcaaagaagagatatggctggccaacaggcacatgaaaagaggctcgaacaacactgttaatcatcaaagaaatgcaaatcaaaaccacgatgagaaatcacctaatatctgtcagaatggctctcattagaaagacctcaaataatgaaggctggtgaggatgcgggaatttatatccccatttctggtgggaatgtaaactggtacagccactgtggaaaacaatgcagaagttcttcaaaaagttaaaaatagagctaccacaggatccagcaatcccactcctgggtaaatatcccaacagagcaaaaactctagtttgaaaagataaatacatcccaatgttcgatgtggggagccagcatggggaatcccgcccgtggcaaaggtcatgaggaagggggcctggcaaaaagcaaaggctgagatcaggcctaaggggtacccctggattttcctgagcatctacccccaagaccagagtctgcctgctttattgtgctgtgccttccactcttctgacataacagggggctatccctgaccacctttctctggaaaaagttaacttagagctccaactggtctcctgcatatgaaaagagtgtctcagctcaaacccctctgatggctctctaacttgcctgacagagacttttacaacttgtgattgtttacagcccctcaaccgcgagaggcacgcagcttaaaacatcttaaacatatagcgccttttctaaagagctaagaattatattggtgatgggtttcactgttgagtcaatgactgctgccaggcctccatattctttatcttttaggcacctggaggatattaatcaatgtaattgcgatatagaaaaaggaatatagtagtttggatgttagcaacactagacttttgagttagtgaactttctctttgttataaatcactgtactcctctttccttgttataaatcgttgtgtccttgctatgtaagaatgtaactttatttagtgctttctgagagtggtaccagactttggaaagaacaacacttttaaggcaaataagttttctggttgacaggcccttatcagaaaagggccataaaatgctaataggcctcctggccagaagatgatgtaaatcacctaagacttgtgtatacagtaggtatgcagagagaaagcctggtctcgataagagtcagggctgctgacgctgcataactttgtattatccattgatctctacgtacaaccaaaagtataaaaagctttctcagacaataaaggatggaccagtcaccggaaagactggtttcccctgtgtggtcttttctccttcttttctggctgaattcccatctggagtgtggaggctcgccatgtctacttacttgccctggcttctaagacccacgcaagagggagcccaaggtggggcaccctccgctattcaagcgggcgccggtggcctacataggtggtgcaagtttcttgtcttgaaactttactagctttccatgtaaaccaagttattcagcctcttttctccactaattttcctactacactattctttcccaatctctcttttctaattaaatagtcctttctaagacaccgactccgtccccacttcaaattccctggatccaccagggttggaccccggcattcacagcagcattatttataatagccaagatatgaaagcagcctaaataagtgtccatcaacaagtgaatggataaagaagatgtagtataaacacacacacacacacacatatcagaatactattcagccacaaaaaataatgaaattctgccattcacaacaacatgaatgaactttacagtctatgctttgtaaagtaagtcagatagagaaagataaacattgtatgttatcacttacatagagaatctataaaaatcaaacaaactagtgaatataacaaaaaataaacagactcacatattagagaacaaaccagtggttaccaaagaagagaaggggaagaagatgggtgtggggattaagaggtacaaactactgtgcataaaataaactataggatatactatacagcatggagaatacagtcaatattttatacatggagtgtaaactttaaaaactgagaaccacaatgttgtacacctggaattatataatataaatcaactacatgggaaacagatggggaaacagtggaaacagtgtcagactttatttttgggggctccaaaatcactgcagatggtgactgcagccatgaaattaaaagacacttactccttggaagaaaagttatgaccaacctagatagcatattcaaaagcagagacattactttgccgactaaggtttttcctgaggtcatgtatggatgtgagagttggactgtgaagacggctgagtgccgaagaattgatgcttttgaactgtggtgttggagaagactcttgagagtcccttggactgcaaggagatccaaccagtccattctgaaggaaatcagccctgggatttctttggaaggaatgatgctaaagctgaaactccagtactttgggcacctcatgcaaagagttgactcattggaaaagactctgatgctgggagggattgggggcaggaggagaaggggatgacagaggatgagatggctggatggcatcactgactcgatggacgtgagtctgagtgaactctgggagttggtgatggacaggaaggcctggcacactgcaattcatggagttgcaaagagtcggacacgactgagcgactgaactgaactgaacacctcaataaaaaaattaaatgttggtaataagcagtatctcatacgctactagttaacatttactgagtgttggtattgctgtaaagctgtaccaggacaattaacagaaagcccttccctcaaatgctatcagggaatggtgaaccaacataaagtaatctgatcaattaaagagactgagaataaaaagaaacatcttgtcatttatctgacaaaattctacgatgactcaaagattttctgcaaggagggacttttcaaagacaatgtgaagtaacatgaaagaaaagttcagactgtgagttaacagaggaaggctgccctttttcttgagtaaaccagtcttactcactttcaggtgactatgtgtttaagaagaagaaaaacggttaattcaaagatgtcaggccacatatgaaaccttcagtaatctgttactgtttttaaaagtcacactgaattttccttttaaagtaacttatccaaggtttgaattttgtacatgcaaaactatgttccttagtatcagaagctaacatctgaatatgtctatgtaacaacaatataaagtcaataaggaaaaggcaactccagttttctttacttaagttgccaaaactggcaagtcattttccacttgtctgattagctcaggtgggtcagaactatttttaccgataatagctggttctcagtatccccaaggtcctgggaaatactgtatttaagtagcaatactgaagaagaaaactgaagaaagaacagctataattgagagaagagtggcagaccaactagtcagtcctggttcatcagtttattaataaattaatttcaaatacagaagaaaaacaatcttccctagttccccttagtaagcactctgagaaattaacctgccctctatcttatatttcacacacaaaaaatgcattaggaagcttgagattgatgagatcagtttgttcagactatatattcatatttaaaatatgcatattttatgtaagcatataataataaacataaataaaacaaaaataaaagcagaatcctacaatctcaggcaaattggaaaataaaactatagaggtagagtctatatgatacatagttaaaaacatggattctaaagcctgattcctgggttcaaaccatggttctgctactctatgtatgaccttggacttaactattctgcctctctgatctgctataaaatgaagctaataatatatacctcatagggttgccgtgaggattcacaactgaagaatgtttggaatagtatctaacaaaaaataaaactgttggcttattattaatcaggtcaaaagcacaaatcaacagcctctctctataaagttatcacaccttactgctactctatgaaagcttcaatattaaaggtgaagaaacaaaaagtacattagcattgccagattacaggtgactggaagttagtccagaatccatatggccgagtgtctagggcacaatcattaacctctgacactaagtcgtgtccagctctttgtgaccccaggctcctctctccgtgggcttttctggagacggttgccatttccttctccaggggatcatcctggcccagggactgaatgcctgtctcctatgtctcctgaactgcaggcagattctttacccactgagccatcaggaagcatgcataatcattaagatgcccttcaaaaacaataaacagatcaaaatgattcctaaaaactttttataaaatcataaaacagcaaacaaaaataaagcgtatatgtatatagccacaaaaatcagggtagactgtatgtatttcctaaatattagtacaacacaaacacaagtaaatcctcacacaaaagaaatcaattccctgttatcatttaaaatgagagaaatacttatggtaataaacttctgagcacttccatcacttgtagcatcacaccagctgccaaaaatagtggagaggaaagaaagtcataggtatgaaaaagcagtggagtaacaggtataggaaagcaggaaacttggagattttattagtttggtattgcattataacattttcaaactcctttcatagtacgtggctgtcattcgcagattctaaatgtttctctcatttcgttttacctcacttgggaatctggatatctgaaataactaacacaaggaaggaattatgggacttccctgatggtccagtggttaagaatccacctgccaacgtaggggaccacaggttcgatccctggtctgggaagaccccacgagcctcagagcaactaagcccgtgagcctcaactactgaagcctgtgtgccgcagcgcctgtgctccgcaacaacagaagccactgtaatgagaagcccctgccctgcaactagagactggcccctgctcgccacgagagacagaccaggtgcagcaaactgggtctgcactgacagacccagtgcagccttaaagaaataaataaaaatctcttcaaagaaattatgtccacactcaggtctaaaatttttaaaaagtgactcataatcatcttccacctgaccacctctctagcctatgtcctgccattcctccacatacacccgtcacattagtgtgtaggtcacaatacctttgcaaaaatgtacctttcattggaaatgatcctatgaatagtattcaaggctcttggaattttccccatataacagtttataacacccatcatagtatcctcagtaaccccatttccttaaaaccaatcatctaaataaactgctacaattaagttctgtttctagttctctgagaagattaaaatggccagaattccctggtgatccaagagtgagggctcggagcttttactgccaagagcgtgggttcaatccctcatctgagactaggtgtaagcctcatggcacagacagaaaaaaaaagtaaacaaataaatagattaaataataaaattataaaatggcataagtccaatgcacttgtattcacagaactgtccctgatccagtgatctattatagttccagaacttagtatgtgctaatgcttagttgctctgccatgtctgactctttgtgatccatggactatagcccaccaggctcctctgcccatggggatcctccaggcaagaatactggagtgggtagtctatcccttctccaggggaactttccaacccaggaatcaaaccggggtctcctgcattgcaggtggatttttcaccagctgagttaccagggaagcccacaacttgttcttggtatatgtaagttcaaataaaggaaaaaaagaaaaaaactaatgaaattcattaaaaataatttaggacaactccgtaagaatgtgaggtttttatataacaaataatgcactgctactactaataattaatagctcaatttaccgcttcttttcttaacccaggtataaggcaccatgctaagaacttttactgtattatctaatttattccttctcaaaccctaggaaacatattatatccactccaccactgaggaaactggaatcaaaacaagatagataacttacccaagatcatacaccagtttccaaacccagggctgccagaaaggaaaggccttgctcttaaatcaccataccgttaagtgctatacttggctaatgctcgtatttggagtatcaggctaaactttttgataatacagctccattttaaaagtaaagtaacacactgacaggatacatttttcaatataagaatcagtctttatgtaacaagaaaaagcagaaaaaaaaaaaaattcaaacagagttaaaaaacaaaacaaagccacggaaacacacagagacagaaacaaggccagagcagagagtcatcacagacgggagtcaactgaagtgcattcatgcattcatcgaacgaacattcatcaaaaatgcaaagatcccactatgtgtcagggaccgtggaggccttagggacacaattattagccaaacagtccctgagctcaatttaaaaattaagtaaatgagagtctacggagttaaaagcagagaagcctttggtgacctgaccaagcacagtttcagaggaaaggcagaggtagaggccagagagcgctgggctgaggaagtcagcacagaccatgttttcacatgatgaacggagaaggtgaatgacagagcgaacgctagggaaggacagggcgagggaagcctgcacagatgcttacagcaaaacaaagttccagtaaagagggcaagggctagacataaaaacaaggatgagacccaaagcacacacacaaaaaagcccaccttaataaggaggatgagaacctttccctttctaagagggacagaagcaagaactagcagaaggaacaggaagcagatccgtcccaccagaaggcttttgttgttatgttcacatagaggccatctggtaaaagttgtaaaacttcaagaaaaaatactaaatgtttaaattaaaagtacagggaagaaactagcaaaacagagggaaaaaaacaatagatattaaagtggtagtctatacatttcaacaattggccagtctgtaattttgttttcaccagcaacactatcaattatacccaaagaagtttattttcagaatcattcagaatgaattttcctagactgggagaacaaggagactgaggacactggtaagacaattaaagtagtatctataaaagggcagaagagaaaaacaggaggagaaaggaaagaaaaaaccaggaagtgactaacagcgagtaagtctggaatctacactggaagtcctgaacagaagcagctggattagagcaggtcaggatgtggtcaaagtgaaatggtcgaatgtaggactttagaagtacaagaatcctgaagaataacaaagtctgagggataacatgggcatacgtgaaggttagtatgttaaagcggaataagagatcaaagaacaacaacaacaaaaaaaaagagatcaaagaacaagaaaaggactgctgcgtcttgaatgagtgtccaagaaaacgtcagttctacgagacgagacgagacatagctttggaaacacaaatctctatctccctcttgaaggttcataatacatattagcatattataagctatgagaagtcctaaataaagaatccagtttaattctgtattcttattttgccttggaaatactgagactcctaacacacgtgaattggccacattcagcagaacacactctgggaaacgctagagtaccagataggcttgtctatgtgcgtgcttagtcactcagtcgtgtctgactctttgccaccccatggactctagcccaccaggttcctttgtccatggggattttccaggcaagaatactggagtggattgccatgccctagtctaggggatcttcccaacccagggactgaacccaggtctcctacactgcaagcagattcttcactgtctgagccaccagggaagccttttcaatgtataaagacatcaaagaatctgcttcaaaaaaaggtgaaatatcaatacgtgaaatcttcaatactggtgatcacgtacagaaaaagttacctggggccagaataaactgtactgcttcccaggtggcacagtggtaaaggagccacctaccaacgcaggctatacaagagactatggttcgatctctgggtccggaagatcccctggagaaggaaatggcaacctgctccagtcttcttgcctggagacttgcatggacagaggagcctggtgggctacagtccacagggttgcaaagagcagggcatgactgagcgcagagacacaaactgtacaaacctttctggtactttctggcactatccaccatgtattgtctccctactgctgctgtaacgtattagcacaaaattagtggcttaaaacaacacaaattttattctcttatataacatccaaaagttagaagcctaagtgagtctcagtaaagcaaaatcaaggtataaccattgctatgtggctttttggaggttctagggaagaacctgagtttgggcttcttcctggttcttgagaccacctgcattctttggttgtgacctgcttcattccaacaggatgctctctgtctctggttctgactcttctgcatctttcttccacagttaaagggttcttgtgattatactgggcccaccaaataatccatgataatctccttattttagaattagctgattagcaatctcaatcctgcccacgcccccataacataatatattctacaggtttggaggattaggatgcagatgtcttttaggaggctcattattctgcctaccacacttaaatatgttaaacatgcataccctgtcattcgtatgtgtgcaccaggatgctcattacagtatttttaaaaataataataaagtactggaaacaacatacattttcattgttagcagatcagcttagaaaattatggcactcctataattttcagcatgctgaggtttccaatgatgttacagacatctaattatgaacacgtctttgatacaatgttcagtgaaaaaaaattataaaactatatggtttagcccaatccctgttgttaaaactatatacatacatacatgtatacaagtatatgaaggttaatatacaaataaactgaaaggctatacaaccctgcatggtagggtgactgtacgcctgcaacacaagaactcaaactgtgtatgtgtgtggaagtgcgaaacttaggccctaagaaatgttttatacccaaattcatcttatggtggttctcttaacactacactttttatctttttccaccaccaacaaataagtcttcaagtaagcatacctctaactcacttttcctttgaatcatacctctaactcattttttcttggaatatcatcttccagttgcactttactgattatcttacatttcatcaccaaaaagtatctcaaagaaaatctagttaagttgttgcctgatgaaaaacgaaataattaagaggcagtagtagcaaaacacattctaatatactgtattccaactaagcactgaaatactaggcctttgggaagagaagagatgggaaaaggactcagtgcagtcagtgagcccatggagtttttggaaaaagactgagagtattaatgcatcaatacagcaattctttaaatacaatggattttagaatgatgcttctcacttcagacagacactacagaagggaaatgccatcaagaacagtgagaacaagatgttaatcatgaaaaagggtctaccttatttttctaaagacagacttgaaaaaggtaaatccaaagatactgtacttactattccgatctctacccgcacccccctcctgccaacgctacacaactctttccctctccttcacttccactccatgtctgatctcaacaggtgaggagtctacaatataagtcctatccacccagagttattttcagaattacacgtactcactaaaacttccccctacatagtaattttatgatgttccacataactaatttttgcctaagatgagactactttcaaaaatagggaaaggaaatttaaatctttatgtatatcaaaggaagtactagaaacagaacaaaaatttctcttttgtcttcatattatggtagaaacatagacaacaaacaccagccacctaaatataaattactcctgcaagactgatgaccaagtttattgaacgagaacgtcaagctcccaaaggaaacgcagaatgagatttagagttcctacgacacactgttcccaagcatatactcattctgttcctctgcctgctgcaccctaccattctttcttcacctgactaaccctactcaacctttaagactgagctcaagggctcaactccagaagctttctctgaactcccaggtagtaaaagttccacctccctcagcatggcaacccactccagtattcttgcctggaaaatcccacggacggagcaacctcataggctacagtccatggggtcgcaaggagtcagacacaactgagcgacttcactttcactttcagtatactcacagcatcccttgaaaacatttaccttggtatttaccacatgtaaatacccctcagtatcagaggggaatgatccccaaatgctcaagtcacttatatattaataaaatggtatagtgtttgcatacagcttttgcacatcatcctcatcctcttgtatatttcaaatcatctttagattacttagaatacttaatccaacataaatactatgttgtctagttgctaaatcatgtctgactctttgtgaccctatgaactgtagcccaccaggctcccgtgttcatgggatttgccagccaagaatttctgagtgggctgccatttccttccccaagggatctttccgacccaagcactgaagctgtgtctcctgctcagcaggcaggcggactctttaccactgagccaccagggaagcccaaatgctatgtaaatagcttttaatacaatgtaaatactatgtacacagttgcttgtgcttggcaaattcacattttgctctctgaactttctgaaattccagccccccatattttccatccacagtcggctgtatctgccagtgcggaacccacaggtacagaggaccaactgtatattgaaatacctgtgcaacatcctcccccaggagaccactagcctcaagatcaaaattcagtttatttgcttttatattcttaaagcctagcactggcattcataagtattccataaatgttttgcaaaaatgaaacagaagcataaaaactctatttaaaacccgttatgtatattgcgcattcaaaaactgctgagacacgatccctatccaactatgtctaaccacagagacaattcacttatattaaaaaaaaaaaaagtctttacaaatttaagaaattgtatgtaccagatgactgaaagacatgaaatgctacaaaaagtcaatgactgcagaaatcaccagggtggacaagaaattttcacagagaaggtgaaacttgagagtggaggataatacctcctacaagtgaaatggctttgaagacagattaaagcaggagtggataaacgatgtttagaagacagtgagtagattactctggtttggggtggctgattcttttcaaaaagtaaggagataccatgtggcagagttagatgagggtcactttatggaaggccaggaatgctgaactaggagctgcagcaagggaaagccacatacaaatgcttttcaggaataacaacacagaagcaatgcaaaagattaactggcaaggggacaggtggtagggcctgaaggagaaccataatttagtaaacatacataaatctcctttttaaaaacactgaccacaattttatgagatcaatgtccagtttaaagacaaagaaatcaacacccagagatgctgttagttcaaaaacggaaagtagtgggcactgcttgaaaaaccgaagtcagcactttcttcttgctactttcaagaactgcaggcctaggtaatcaaatgaagactgtttcaagagtatgcatataaactgacagtgctggaaatgaagaaagaaagaaaagacaacaggaaggcaacattttccaaagtggattatgtgtggaagagggtgaggaaaactgggagaactcaaagatgactgccgcattttaaacctgaatgggaagatggggagtagcagcatgaatggcgaagaatgagaacgcatggggggttgggggaggaagggtaaggagcaagagtttatctttaagagtgttcagtttgctatgacagaaagacttctgaaatgaggaatggccagaaggcagcagcgaaaaattatcagattagtcagtgccgggggctaattttcaggcatcatacacagctaaaacttatatgcttactgtatgccagaactatcccaaacactttacacgtgaacccatttgacctttataactccaagggatagatgctgttaactatcctctcttttcagatgtggaaactgagatatagaaaacttcagcaggttgcccaaggcagcacagctctaagtggtagacccgtgctctgaaaacaggcagctgtgtcccagagaccacactcaaccactgtacccaactgctctttgttctgtattattttgcatttatgcctgttgcattagtttataagctctctgaatggcgggtgtggtctctttcaccaatctgtctccataggacataggagtatactaagtaggtgcttgataggttttaaacaatgatgacggaagacgcaaaagtactgcgatttctgaggggaaaaagaacgtaggaaacagaggagtagggctatgcctttcgttttgtcccaagtggggtgaggcggaccaggaaagtaaaataagaagtagggtaaccataatctcagcactaaaacccacggagctcaccaagtccccgtaaggccccagagtgtgcatcgtagtagctgtgaactatgtgggggtcacgtgctcacctgtgggtctggtgcgcgtgtgggcgaagtcgcttcagtcgcgtccggctctttgcagccttacgcactgcagcccaccaggctcctgaaccctgggactctcccagaaggagtactgcagtgggttgccgtgcctcctccaggcgtccttctcgacgcagggactgaagccacgcctctggcgtctcctgccctggcaggtgggttctttaccactagcgctacccaggaagcccctatgcggcctggtaaaactacttaggcgtatattctcatttcatcctccagagatctgggatatatcttggtccaaactgaatgtttactgatgggatggatggacggatatgagaagaacacagaaagactgaggaaaaggaaagcaaaagtctgagtgagtgagagaggagaacaaccaatggatgaatctggccattaggtctctggcacctttggaatggtcaaatccaacaaagtgctaaggaaaaatagctgtattacaagggactatggtaaagaagatggtaaataaaaggaaaaacatagtatacggcaaacttgaaattgttagattaaagaaaagccaaggacgggcagagcttaaagggaaaatgggaacaggcaagaacttttaagagaaagctgagtttggtccacaaaacagaaaactagtaaaggcagtgattaaaaagattaaaaggaggaacacagcacatccgaaataaggttctagagagagtaatacataatcaagaacagagtcaaggaaggaattctgcaggaccccactgccaaatggcttttcccttttcaagacctctaccagccaccaagtcttcagaactaacacttcacatatgtctaattctctgtccataacagaaaacttagaaaggcctggctagaattctgatgttatacattgaatgagttaataaaatttttaaaaatgtatttggaataaaggagacatgagatgttcttcttgcctgaaatgtcaatttaaccaataactacttttgaaagtcccaaccatatttaaaaacccagaccaaatctcaccttcttcgagataccttcctcatcccaactctattagaataaagttcctttcccttaaacttgcacagtacgtgtttatcaattcactcactaataacctttctctagtgtctttgaatttcccagaggcaaagcccgtataattgtgatctgcacattagtattcactaattgccagtaaaataaaatacaatttttttaataaatacatttaaaacctgtacaggtttatataggtaaactctaaacatggtaactagcctattactaccgaaaaccaaactgctaagagaagccttagccttatttgtaacctgcagtttgaaggaggtgggaaaaaataaacctaagtcaatctgtacccacagggaacttttggcaatgtgctggaacatttctggttgtcaagaaaggggttgaatgatactggcatctagtggggagaggccaagggtgctgttgaacatcccacgatgcacagaattgctccccacaacaaggaattacctacagtacaaaccctgagcagaactgttacctagtctaccggagaatcataacgtttttcttaacatagtcacctacacttaaaaaccgggcctcagggaaggtgaaaacaacctgtcactctgcttacttgttaacaagaaaggagctggttacttctcccttaccgtgtgacatgttggcgaaaatgccaccatggtatttttctgtaaccgttgattaagtccttctaagttgtaacttctcaggccattgacaagtctattcacaacaattcaaatacagctcgattacaaaatttaaatggcaatgtgtgataaccacctgccaaaatacccacatacagatgaacaatccactgttcagaagacatttgcttaacagtctattctctgaaaaagatcagttaaacaaacccacctaaactttcaggtacttattcatgccaccagtaacaaaaatctgaaaggctagccagggttagagatgtagttgtgggctgcaaatggtatttctccaccatacaacaaaacagcccttgttaagtctgaactctcatgcatcacaaaactgcctcatgacaaacgtgctacactagagggtccagatcctaacataacacatcttaaaatacaaaacaaagactcagcaagtgcttcatcgaccatgaagataaaacagagcagctgttagaaagcaatcaaacacaggatggaacaggaactatacattttgagtccaactgaaaccacaagtgaagcagaaattaactgctaaaataatttagccagttaatacccaagtaggtaaaatgctgttagcactactccatcaaaaaagaaactaataagccacaagagagggtaatttttttcaaacaatttcaccacatttggtaaatcagccacatttggctgtatttctgggaccaatgctattttaaatcttcagcatgagagtggggaggtgagtgaatgggtaaggagaagacttcttgaccatatgaattagcatcagtacatgctagaggacttcttgagccttccaaaacagtgaatatccagtcctgcattaccagattcttccagaatctggagcccaccctatttagtattcatatttcccccaaatgatcccatgacctagttctcctctccaggctagaaaaagactctgcttgctactttatccagtctcatcccttccctttatctctctctgtctcaaggtttaaagtgacaaagttgatcttacaacatactggatgtttaattagtatttaaatgacactcatttttctgctatctcagaaaaaaaccttgtggctgctgtagatctctccttctggtaacaaagtttctgacaaagaatatgctactggaatgcacctctccacccacaggagtattattcagaaaacttctacaaaacaggtaagttgtagttctttcctgtgaagtggtctaacaccagggatcaacttcaagtggatcccactggaaaaccttcagcataacaagaaattaaagacaaaaaaataaaaaaggagactactgaaggaaagacggagaggagtatgaacagttgcctcccacaaccatgtagctgtcattcaggagcatcagcagccaccttttacaaccagatttgacctaatattccctatggctatgattattctatgtactcatcttccaaaacaacttcaatgatgtccttcctgtctggtactttaatacttacccagctccatttttccaaccttgacatgttaatttccgtatttctattctttcaaagcatgatattatacctcacctactgtctcctctatggcctattcccacccttgcctacccttctcaaatgaactatattcaatacacctttttcttttattcaacaaagatggcaaagtctttaaaaatctttccattttgtcataaaccaaaaaagaaaacactgaattctttgagattaaatttccagtgttttcagtctaaaagccccatatttaagaccattgatttttataaaatataaaaatgtattctcaacttaatcatttggataggactctaatcggtctattttaaaaagtgatactcccttccccttttaccaataaaagagtcatcattctgtcttgcccagaacatcacccatacagaggataggcttatctttcctttcatctgctcactatttctacaactcaagactaattcagtccctgtgatgctgacttccctctctttgtcatactgaggcttcttacctcatatcctcacttctcactctttcgaaactgccaccttatcccatgatttgccactaccccaccatttcaacaccagctcatttactctgacaaattaactcagctgagacagagctaattttcacctacatgaggaagatctgtagctgtctaaagactgcccagtcatggtcttacaccactgacaaaggtagacaacaacactcttcctaaaacgaaagtcacaaagaataactgctatacccacaaccacactcattcagcatcctccccaagttgtctataaaaaccaatggttccatattcatcaaaggaaagaaagtgaacataatgcttccctgaagacattctctagactctcacagcagattttatttttaatttttaatacaatgtttaaaggttactgcccatttacagtaattataaaatactggctacatttcccgtgttgtgcaatacatctttgagtctctcttacacccaatagttcatacctcccactcttccacccctatactgcatcccactccatccccactggtaaccactagttaccagcacacttcaaatggagtgagtatctaaagaagagaaagaaggaaatcctggctggtgcatgtcttattttatcacctcatcccatttctgtcgactactggccctaagatttgcttttatttacttaagacaaatgagcaagactgagaaaagattggctttcaggaatctttatgtgatttcaggtcctacacctattcaattttgcctgttcaactttagctgggaaatttaggctatttaaacatgtgttcactcttatgcttttcttccttctttaaaaaactaaattcactgccaggtgtctactactgattccacaacccaaggataagtcttccttaccatgctaactttaaaaacacaagatacattaacatagaagcctctcaaagccaactgatcttcccattaaaaataccaccatggaacttccttggtggtccagaggctaagactccaagctcccactgcagggtgcctgggttagaaggctggtcagggaacaagatcgcaacaaagaccaagcgcagccaaataaataaatatttttaaaaactgggcttttcaatcatcattcatcatcatttaaaaaaaataccaccactctcctgatctgcttttcaccatacctttctagtctcactgacaccaccttatttctggtccttaactgcccaccacacagatacaccttcccaatacaaagctacgaacatgtgatttcccttctaaacaaaccgtctcagtctccactgtccactcattttaatgatacactacaggtcaaagtattcaagattttttctctgtgggcacttaatcaaatagactttcccttaccaccctgtctatataaaacagcacatccctgtcttactttatttttcttgctagtacttatcaccatgtgatgaacacatttatctgttcctatgtttatttgttgcatccttccatcagaaaatactttcccatgttcactgttatcattcaccactgaatcctcagtgcctagaatacagcaacctctcaagacatatctgtggaaagaatgggtgaattcagacatgctgcacacagcatagctggtctggagtcagaagacctgtatttgagttttagcttccacaaaccaattatatgagcctcaataattttaactttggggggctatgctctcttcatctgtaaaaagaaggggtcaaacaatctatgaaactgttaagtttttcctgctgcatcaccttatacttgtgtttacctggactgaatacttcccccagagcccaatcctcctttctatatatctctgctcagtttccttcatatggattcctcctgcgcaatccacaattctcagaatactgtttatccttaaggtccaattttaagtgctgttttctccttgaatcctagcaaactgcaaactctctaagaggagggtggagttttatactcttagtagttagtacaatgcctcccatataggttatcaccaaaatgactgatgaatcatgtgtatgaatgaggaaataaacaaaggaagcttttcctgattcaccccaattgctcgcatactctgcctttggactcatgacacttggtatcttttatgatccttaccatagtttacttgactaatatatactaacctgcaaattccttaaaattaaggactgtcctgacagtttccatatctctcctctacagcatctatcatacatcttcaccacggttgtatttattaagcttatctgatatgttaaacaacaaagggataataaaggagaaaaaggaccttgaaatacccctataattccacctacctaccatgcagtcattgggcatacatgctgtcagttaaactcaggcattccaccatacttgaaagatctcatccttctctacacactctgcttaataaaacgattactactttcaaaagcagaatagctaccctcatgtagcacttaactacaaaccttttcttgcagggatccactcacacaccaatactttcacttcactaaatggctaaaatgacttttctgctcatttcagactactacccccatccaattccctcctccacaaggtatgaaaccactttttaaatcattttaccataagcttgccattcttagttttgctactaaaagacaaaaagacctgtttcagggtctcccttccccttttctaagcagtggcaactccccacttaagtcttaggatcttaacaatctcattttcctgtgccatcaggatcttgacccccgtttatctctaccttcaagctcttattctgcttccatggaaccttccaagctgcacaatagctggtgcaatacgctctcgccaccatgtacttggttccaatctgcattttccttctccagtgtgtattaatcgcccccttaacctcccctgatacacatcacacactctcaactgcacccatgcgtcactctacctcgacatacaagttctttacaccactcttaatggatctacacgactctccgaatggtatcttccgacggattctaacccaatttcttctgggggatccaaccccggctgtagtacctccctttttcttcacttcctcatccattcccttctttttgccccctaccctcaccccaccaactaactacagatgacattatttctcagtacttccaaccccacaacgatgaacaaactccagtttccggcggcgtccccctcctctaggcctccccccacaccccaggtgtgcagacttccacctggccttctccccagccatcgctccagccccacaaccacaccacgtttccccgccgcagggatcagactcctccacacccacctctattcggggtcgccgccgcctccccgggcgcctccccgccccgactcgccagcgagccccgggcgcgcgcgcacacacacacgttctcacgcttccctaacctccttccccgcaccgagaccagccagctccgcgggaactcagcccggcccgcggagggggataggtacccaagtgtgtgcccgctccgccccctcccgccgagcctctcgcagcccccgcctcccaaccgggaaaagagaggacacagcaactcccccgccaccccggacgtaccacctctgtgtctgttgctccgtgcccccaaccttcggcccactccccagctccgtactgggccggcccccacactcaccggagatactgcgcgctctgcaggctcatcctccgccgccgcgtcttcccgcgaagcctctgcgcgtctctcaggctcctcggagcggccccgcggcaccacgggtgctggcggccgccgccatcttcctctcctccggctcctcctcgctcggcgggggggtgggggtgagtgaggcgaggggggagggagcggggaaagctgctctcgctgctgctccggcccttggggcgcagggacactccgacccgggaaggggggagggaaagggagaagggatgggggcgggggaaagagggacagcagaggaaggaagtgggggggggtctctcgcgagatttcagcggcgccggtccctccgggtgatttccgcctctctgtagcgctccctcttgggatcagttagccgtgcggcgcctgtgcggttgctgaatggcccagtggaggcgcttggcggcttccggccaacccaccccgctcctcccgcgcgagggggcaaccccagcctcaccgggaacatcgagcccgaatcaatcgggagttacactcaaagtcttcccccgtctttccactccgtccgatttcgctcttccttttttcctttcctccactcttcccgaccggaaacgccgcctcttcctcttacagttccggcccccagtccctcgtctccggtccgccctcgcgccctaaagtgacgctaaggaccccctcctcttttctggggcccctccctctgcacgcagggatacagttggaggggttagggtggagcccagggatggagagaaaagaaaccaatcggattggataagcaactgccaaggcaactggaggctgtagctgcattgtcatagtaaccaatgggtgcaggctgaatgaccctcccttggcttagtggattccccgaaaagtgcctagggtttcccctcggcttcccttccatcttaaaggcctcccccaggttgggaatcgggtagttctccagagcagtgaggttcattttctcctccctttccctttcccgcagcgatgggggagatcccgaggcattcaccatgggcttttccacccgcctgcgggcgggaaccgcctccatagttttcctctccttgacggacgcgg

SEQ ID NO: 143 - DNA, 151799 bp, Hippotragus equinus
  source 1..151799: mol_type = genomic DNA
tatgggtacagctgatacgcctgtagagcttctactacccgtcgcgcaccccagtagagaactcgctgaggattggtaaggacaaaggaaagtttctggcaaagttgagaaggacagggacagagcagggagcagtttcagatcatatttaagccacagacagtggagaaagaagaacatcccccggctgctcttaggtcgccgcagggccagggaaatgcgagaaggaagtttttctcctggacctctgcctccttatccccgagacgcgcgaagtccgccgcgccatccgtcgaagcctcggcctctgccgctccaccccagggccgaccgaccccggcgtgcggcagaagataagcggtcgcctcgagcgctcgcgcccgctcccgggctggccccgcgctggggcctgtctgccctccgggcggccccaactcagccactgggctctaccccggggccctggccactagcgctgagctggtctccggccgcccgcctccgtttccccgcgcgccggcgctatggcgacagtcacgagactccggcggcccctgcgcccgccaatgggagcgcacgtcgcagggagacgcggacgtcgctcttccaagatggcggcgcgtccgtcgcgagcagccgggcaggggggaagccagcgaagccgagtaaagccgccgcccgggagaggacagaaggagctgttgccgccgctggcggcggctcaggcagttttcgctgctgctacggctgttgccatgcggcgaggctagggaggagctcacttccccggggtgtaataatgttaacagaggtaagcggcgacggcggccagtgtttacctgtgaaatggggaaggggccggcgctggccggtcagataacatcatttcagccgctggcgggcccgccctttgggagcgggcccccggggccgagcagcagcggggatcctacaagtgccccttgaagaggagcggtgctgactcaacagtcccaccgcctccggctcgcctgtgcctctggtttcgcggttgccactcgcccgccgcccctggcactggtctccctcctgctgtcgctgcctccggactcgccgctcccttcgtggcgtccccttgcgcgttgcccggtggccgcgtcggtctccctgcgttcgtgctggtccctgttgccctacggtttgccccgggtgtctcccttctcgtgtcgctggcctctaggcccctccgcttcccaactcggtcagcatcctgggtttgtcactcggccagtctggctggtttcccaccccccacctggactacttggtgaagaggacctctttgtctaagacacttgggtggcccggttacattaacgccctatcgcacacccctcacctttcgcttaaatcgtgggaatcagaaagttgagtgtagcatctgtcctcttgatttgcttaaggctcccttggtactttcagtggaacagttttgtgtgttttttttttttttcctccttggtcctgaaatggaagtagggcaagtgtgacgagccaatcagtttcccttttctgttgtctgatgtccattgcaaaaagtagactttttgaagaagcagtttgccttccgtagcagtactttaaggggaagaacaaaattgatgtttaactaggtacttgaccttatagttaggtgttgtggtgtatgctcttgggtggcattgaagataaattctgaggcttgtggatttgaggaaatgtcttagaagctactcacttgaagtcctgtgaaaattccagtgtcagctgtcagggactagtttgggcatctttgtgggctgaactaaggataggaagaaattttaatgggcagtgggaagtattcctacttggactgatagagaggaatgtgtgtagatgagtggcttttgttgtgtgaaaacatggtaatagaggacctgtcctattttattgactctgaggaacttcatactttggtatttgtacttgataatgtgtacagagcctggcatatgatgtgcctggtcaatccttattggttgattttagctcatgaactacttatttctagtagtttgtagttcattttgtatttctatatcccacagattttttttttttcacttcagtagttaattttatttccggagattatggtacatcataagcttctgttgtcattagcagtgttaggtttgaaaaaaagataagtatcagaagttttatttttacctgtagtgtgatattttgtgggaaagattagccttataatttttcagtgctgttcataatatacagtattttatgagatgatcttttgattaaatttggcttagtttagcagccattgaagagttgtaatgctttcacatgaactcagtgctactagtaaaatggggaagactgaattttctaagcatctgtgttttattgtttaaattattttttggccatgctacatggcttgtaggatctcagttctctgacctgggattgaacctgggccatgggcaatgaagcctgaaatcctaaccccgaggccaccggggaattcccctaagcttcccagttttaaaataatttcatgttgcagtgacatattttcaatagtaagtcagtcattgtagttagaggtgctttagttgtgtgtgtgtgtgtgtgtgtgtttagttagatgtgcttaagttgtgtgtgtgtgtgtgtgtgtaacacgtttgtgtgtacacgtacgtgtgtgtgctgcacttagcttttaagagtcagagccagagttccaaccttggctatctctgctgagtccactgttaacaactaccctggattgtttctccaaagtaaggcccagattaaatgctacttggatcttatctatgtctgtgagtaatcattttatagattagaaaactgaagcccagagacttgtccaaggccaaattattattagtggcagaggtgaaactggaatcccatctcctgactaggtacagaactctgaccatgttgctccctatgagtaattttcagctctcttcatagattttaaaacatactgctgctttgtttgaatattgtagtagataagctgaaaattattattacttgagaaagacttttttgcttgaccgtaggtttttttggaccacattcagaaatagtcctgttttgaaatattttggatataaaatgatactcagtattgatttactaaaattgtagtgtgagatttcttcttagtgcttctcgtagtgctgacttagatatcagcatgtttgggggctgtgatttgttttatgtgagatctcagaatgtataatgatgagctctgttcagcgagtgtatactgtgcccagaaagcggtgaatcatacagtctgcttagttctttcacatcacaagattggggcgggtgatagccccattagccagataagaagactgaggttgagaattaaaatagcttgcttaaaaattatacaactggttgagtcagtaatcacacctaggaactcattccaaattgtttgttgtttctgtggctcagtatggaatgcatcattaatcttttttttttttgtggctcataatcatcagtacactgttttcagtttggttgtttttttttaaactgaggtgcggatgtgaaaaatatagctacttaatgtagcattcatatcaaatgagaataaacattcatgtgaaacttttcacttttgcattttgtcagactaggtctttgaacctttgcagaagtgagaaaccatgcaagtgttcaatgaagggctacattaaattaagctgaaaggaaaattttctccagttgagcaaattcatttgtatacactgaactcagaaacctgtgagatatgatagattagtgtgaattgaaagtagagcgccagtggatcattatgctgttttttctttttttaatgtaaagagaagttattaacatagttctcagtttaagttttttgactttgttttgttttcattctaaatactgttgaagtatttagaagactcgctagttatatttgtgtatttgtgtcctttgcatttccatatatggatgagaggattttttttttcaacttgatgtccatttaactttttttcaggacttcttaattttaatgttcctcctataacatttgtccaataatttgtaaatactatacttgaaaattgtttgtttaaagctcacttacttatcctctgtgtgcgtgctaagtcgcttcagtcatgtccgactctgtgaccccatggactgtagcccatcaggatcctctgtctgtggggattctccaggcaagattcctggactggcttccatgccctcctccaggggatcttccctaaccaggaattgaactcccatttcttctgtctacctgcattgttagcacaacctgggaaatgccactctttttacaataggagtgaatttcaacatatcagacttagggcatgggtaagtgagtagttactccaaaatcactgcagatggtgattgcagccatgaaaataaaagatgcttactctttggaaggaaagttatgaccaacctagacagcatattcaaaagcagagatactactttgccgactaaggtccgtctagtcaaggctatggtttttccagtggtcatgtatggatgtgagagttggactgtgaagaaagctgagtgccgaggaattgatgcttttgaactgtggtgttggagaagactcttgagagtcccttggactgcaaggagatccagccagtccatcctaaaggagaccggtcctgggtgttcattggaaggactgatgctaaagctgaaactccagtactttggccacgtcatgtgaagagttgactcattggaaaagaccctgatgctgggagggattgggggcaggaggagaaggggacaacagaggatgagatggctggatggtatcactgactcgatgcacgtgagtctgagtgaactccgatagttggtgatggacagggaggcctggcgtgctgcgattcatggggtcgcaaagagtctgacacgactgagtgactgaattgaactgaactgaaaggtatagaagatgtaggacagtgtgctgaatttggtccagtgctatggcatactctggaggttatctttgcatgagaaccaatcagcagtctgttgacatgcgtgcttttaaaaatagcgaataaaaattgtagttatttaaagttagtagttgtttgggttgtgtgtaaatcagggcataatggcacccccctccagtcctcttgcctgggaaatcccctggacggaggagcctggtaggctgcagtccatggggtcgctaagagtcaggcacgactgtgtgacttcactttgacttttcactttcatgcattggagaaggaaatggcaacccactccagtattcttgcctggagaatcccagggatgggggagcctagtgggctgccctctctggcgtcgcacagagttggacacgactgaagtgacttaccagcagcagcagcagtaaatgttacttacaggtgtgctaagtaagttccatccagatttattgatttttttgtatattaatgctaattcttgattttgtggttaacaaatatgtacagatgggtaaggcataagctgctgctctttcagaagtcccaggttaatagttgttaagggagtacaattttgtgattcaagtatgtttggaagatttgcctacagaaaattaaataggacttcttatagcttttgataggtgatttactctcagagaaattgttagaatttgtgtcaagttgcttacagactgtgagagttaattttatgagttaattttatgtgtcgaccggccttggagtgtcacattaaactgtatttccgggtatagtggtgaggatataactggatgaggacaagattagcatttgaagtggtggacttcttagagtagatcgctctctgcagtgtgggtgggcagtgtccagtctgttgagggcctgaggaagacaatgggaagaaggaatttgccccttttttctgcttcactgtttgagtgccagctcaaatgtgccatttcatcttctacccttgggccatgctttataccatcagcttccctgattctcaggcctttgggctgaattacacctctggctctcctgtccttccagcttgcagaaggcagatggtgggacttctcagcttccataagcttgtgagccagtccctcataataaatctcttaaaaaaaatttccgttggttctgtttctctggagaaccctgtcttaatataaagacttgaaagagtctgttgtattttgctatgggaaaccctgaggtgtgatgagtcgtgcatcaggggagatctttggacttgcagagctctttttaaaagacacactcacatacgctcttgctcatagggagtgcttaaggcaaaatcatgacttgactttgtggattaatatatttgttcagagacatacacttgtggtggattattccttaagcgatgtgatctatttctttaattattaattaatgacattttaaaggctactaaccagaacaagaaccataggcccattgaccttcaaaggatgttaagaggtgggaaagagattttacaagggaagtataaggacatcactgtctaaaatgaggccaccttgtcactctacatatgactttgtttaggatcttctgacaaacgaagttgaatattgtaagccatttctcaagaattctaaaggacctatgtttcatttttttaccccattgattccagattttcagagagcttatacataaattattcttacttcatatttattttcattatattttattactgtagcacacatatacccatttttcatcacttttgattaacagctagctaactcattgatagaattgcaaacaaaagcaaatatgtttgaatttttttagttaaaccctataactttatattaggtaagtcttgcttttccatttggcacttcagaatattaaaaaagaggttttagatttccataaccatccttggatgtcctgggtttgaagatcctaatgttcagatggattgttccaaagttttttttgaccactgtttcacaagaattgggcttccctggtggctcaaatggttaagaatctgcctgcagtgtgggagatctgggtttgatccctgggtcagaaagatcccctggagaagggaatggcaaacccactccagtattcttgcctggagaattccatggacagaggggcctggcaggctatagtctatggggttgcaaagagtcagatacgactgagcaactaacacttttactttcaccaaaattgatataaaaaagtttcttaactagtccactgtgtttaaaagttctgcactaattgccacaagtttataaaattattttatttgaggaaatatggaattaaatttggaagaactgagtacaaatgtttgtagtttaaaagataacaaggcattggtttgtgaatagtaaggccacacttcagaaatggctcttcgtttctgtgtgcagtaactagcagcacatatacagagctttgcagattgtaaaaggtgctttatctcttaatcatcaccttgttagatgtgcttatgtttatgttcagtgtcatttctagtttatctatggaatagagtatgcttaaagagaggaaaaaaggctatgagaggatgtttgaaatagattgttttaggtgggatccaagtaagctttgttagctgactaatagtggaaaaggagagagtgagcttctggaagacgaagaaaacaggttctatcacggttgagagtttctgatgctggccactcactaactagctgtttgatggcaaagctgtgacttgatggcgttcctgtgtgaggttcaaggctgtgactttttaaactgtgttttgaaattttgtggtttcagagaccaagtgccccctcaattgatggtactttaacattgactttccatttttgaatcaagtggacagctctgttttatcatgttaaaaatggttcaaatttgaataataggttggagtcatggtgttggatactttgtctgttagcgacctcaatagtgaggctacccaagtatgacctatatgttaagcgttacagggatgagtgttagcttcatgatttatttatgatgtgacactgggaaagttgtttgaactctgagtcttagtttccttctatgtaaaacagagatgataacaccttcctagttactctcatattgttctgaaaattgaataaatggtagagtaaaactctttgtaaactcaatcattatacaaatattagtggttaatatataattttttttcctctctgcacttacatgaattcaaaccctaggctccatctagctttatagcttactaacttctcagtgggtgggtggatcccaggagaaaagagggtgtcctctggctattggtacagtaacagggaagtcagggattagaccgaaagaagggaaagaaaaaagagaatagactgacagcaggtcttggcagctagtgatgaggatagtttcttgtgtggttggtaaacattccaaagaattctgcaagggaagttccaaaaaatattttggaaaaggttgcttatttgggggctcatagtcatttgtgtgtacacattatgaaatatttgtggcaaaagaattcttttatttttaaacaacccctggtaagttctaaaaaggaaaagctgtgtacagtgtttaaaaagctttgatagtaacttgtcctgaagattactttttgtgggtcactttgtttaccaaacgtacatacccctactgtgtggtaggcatatgctgcccacagcacagttctggtgctgaagttgcctctgacctgaaacctcctctcagaaaattcaccatcagagctcatgttggcagtttggccatcattcagctgaggccttgaggtgttttttttttttttttgtcagaataaaacataatataactaaaaggtgaaaaattcagagaaataagagtttggagaatttgtaattaacaggtaattacttgctttttttttttctttttctttttttttttttaataactccaggtgaaactaccagtttggatgagatggcagttctaaaatgaactgcttcttacaagtgaagaattgacccatttctactgtctctgtttgctccaagctaattcacagaagtgaaaaaaaaaattggtgaatttgtctctttttgtttgctttgtttctctgaaaaaagctctttatcactccttaggaggtctaccaaattatactgaaagacctggctgaattccattaccttggtaaaagtaatacttggtccctaccctcatacattacatattcacgtgaactcccgaatatgtggtttactgttgtgttcccagtgtctggaacagagcttaacacttagtcctcactaaatagctgtcgaataaaagaatgttgaatatcccctcccataaaatgaacggaaattgaaaaattactaggacaaaaattgtctttgataaatttaaactatcacattaattaccctttaaagactggttggtgtctaactccataaggagtttttaaatagtacactgtggttgaaattatgtttgtgatcacaaaacacacaaaagtttgaccaaaaaaaaaaatagctaacatcaggcatttagttagaatgtaattctgttttaatttttcctgcagggaaaaatatgattaggttggtgtaatctttgcttttatgtagtaaattataaatgcaagaacaacttggattctattttatacctcttgctgctttatttttatggtttcatttgtattccagaactaggtaaacttaaagctttgtttctaatagcacggtaacgcacatctttgtgtgctctgtggagtgtttcatgtttgtatgacctttaatgctgtcttgaaatctgcaggagtaaaatttggtcatgaatttcaaaaatttggaaatttggggagtacattttctaggagggcagctgctaccatgatctcttacctaaaatatctctccatgtcactcttactgtttgctcatttcactcatctctgtttccattgtatattcagaaataacatgtaccagaaaagtttgacaatataatctgctatgttcagtggtgaaaattaaactggcttaatagtctttcagttagtaccagaggctcatatacagtctggaataattcagcattgttagattattgcaccattttctccagtttcctgaggaacttttaattctgatgcagccaggagactcctaaggtgaatcctgctttgctttcgaccttagcccggcattattggagagcctttttgagtgttactcccgtttaaacctgacttgctggaaccctggagttatttttagcctggctgtggcctggcacgtgagagagtatgtgattctttgtattgtgacatcttttattttcaggctagtgttgtgtgacaacaggacgtgtatggagaatggctcttggattcactgtcatttgaggcttggaatttataaaactggttgaagttgtacagttttcatggaagagtagagtctgaaataaaatttcacctccgtttaattttacctcagtttggggaaataatggtctgattttaagatactctgatactatgtattaccagtgtttctccaagtcatggtataccttagaatttgttcttgatttcccttcctgagattatttggggtggcattttttttcaccctcagaattttcctcagggtgttaattagattgcaactattaatataaccagctactttaatgtctagtgttaattgctaatatctgatgcttttttcttgtgtactacctgagtgctcaacacttaaactgttgcagtggtctaatcctggtaagagttagcagaataagaggaaatgggctagagggagggtggagacaacttgaaatgtatagtacaacaaaggtacagaaaaagaaactgaaatgataggctgtacaaataatgggtatattaattatataaaaattttagaaaagttgattaggcttaagagtattttatataaaaaatgttttttgaaccaagttctacaagttaatatctgatagctcataatattcagtcaaatactaagcactaatgtaaaatttataggactgcagaagttagtgagttatctttctgccggaactcaaaaagagtgttatcatctatgtctttatctcttctaaacacagattgaacattcttacattcttaatttctgaagaagagtatatgcttttggttaagactgacagtaggtgtcagattatttggatatgaatctgtaagttttatcagtttggagtattttgaccttagaaagttattaacctttatgaacctcagttttctcatcggtgtaacttttaaattaatgatctttagcccatagggttgttttcagtattaagtgaaatagcatgttaagtactgcacacggtatttcccacagtaacacccaagaaatatctagcttttattattatttcctcagaagtaaataacaggtggtttatttatttaaaccacttgtttaaaatttgtttgaagttgttttttgtatttttgtctttgtttcattggataagttttaaaatgtcagatcaaataaagtaattcccttttgacccagatgatctaattcttcccttactttctcagtttttattaactttctaatgtatggccaacctagatagcatattcaaaagcagagacattactttgccgactaaggtccgtctagtcaaggctatggtttttcctgtggtcgtgtatggatgtgagagttggactgtgaagaaggctgagcgccgaagaattgatgcttttgagctgtggtgttggagaagactcttgagagtcccttggactgcgaggagatccaaccagtccattctgaaggagatcagccctgggatttctttggaaggaatgatgctaaagctgaaactccagtactttggccacctcatgtgaagagttgactcattggaaaagactctgatgctgggagggattgggggcaggaggagaaggggacgacggaggatgagatgactggatggcatcactgactcgatggacgtgagtctgagtgaactccgggagttggtgatggacagggaggcctggcgtgctgcgattcatgaggttgcaaagagtcggacacgactgagtgactgaactgaactgaactgaagtgaatgtatgtattgcactagggctaaatttagactatatcaggaggacatcaagagaggtgacacttgtataccattgccataactagaacttttcactgaccaataatttcttctggccattaacgcttttactatagatgaagtgaaaggaaaaagttgtagtattctcatgttatgctttaaaaagtgtcagcattgtgtagttttctgctatgggaaatactatgattcttgtcaatgtaatcaagttttatgtaaagtaactcagaatttatataagcttttctcttgaattgttcctttatagagaatagaaaaagatgaggagtgttaaaatcctttgtttaaaagaaaatatgtagttagcattcagtactgtatagtaggttaagaaaaggactttcatttgtaaattattaattgtactgtacatctaaatatgggtattaacataaataattgcaattcctttattcagcagctccttatctgcattcctgtaatagtacagtaaattgacatattcgaggagaggagtgttcatgtgataataatgtttacttagttgaagattgtgccatcaaggtcttctgtgggtgaatctgtgcctgtctctattttccttactatagttattttttcctccttgtcgtttttgctttgtggatatgttgattttcccccctcatctctgtcttgtattattctcttccgtgtctgtagttctgcagcttcctttctcagttttttcccttgaccttcacccttttctgtccctctgaagtaaatttaacaggccacaataaagagttcagcttttatttttttaagttatattccacttaataggtttaaaaatattttccattgctaatttaaaaggcaaatgtacacacagtttatatatatattttaaataatacaactcagtatagcttccttttgtgttgtatgccttcttatctgaatttattgattaaaaagcctcataatctcagagttaatgagtgatgttgagctttattttttatgtgaatcaagaatatcttgtagtactttcaagatcattgttttgttgcgttgttactgtacagccttcaggaacatgaaggaaatttttctgaacttgtgtcaactctagaatataccttggaaagttatctgaatagtaataactacaaaatctacatcagattcttaaggagtaccaaggactttaagatatatcagttcagtcacttcgggtttttctgataaatagaatttttaaatcttaataaatccctttcatttgattccttagatacgtgtgcagaattttgcccagcacctccacatcattaaaaaaataaaaacaaacctacttgagagccagtgtgaaatcatggttcgggacatgcttgaactttaaaccaagccttagttcatggtctgcttctgtgtcttaagctgttcttcatctatagattagagttagtaatatagcatgtcacagagttgttggagaattagaaatatatgtaaagtggttagcaaagcactaagcagtaaatactgagcactcctttaaaataggatgcttcttttcataagaaggcaaaggagaagtaggaggttggtgacagttcagtattaggctgtgctttgaacatcttaactactgtgactttccctttcgttatctattatggggaaaagcagaagttgaattgtcaatattgggactttttatttttgtattgttaaagtcttacatgaatgaggcaaagggacacttatgaatattgcctgttttattttatattctaatagttaactgccgtggtaaaagttttgtgtactttagtagagaacagtttggcagtcttctgatgtattagctaaattcattctttctaacttacttttgtaagaggagcttaaggtaatttgctgtgtgattgagtttattttcccacaagccgtatgggaagattctagtttctttacattctcaagaatatttattattatctgtatctcagtagtgattttgatttgcatttccctaatgtctagtagagtttccctgctggctcaatggtaaagaatccacctgccaaagcaggagacgtgggtttgatccttgggtcaggaagatctctggagaagaaatggcaacccactcaagtatccttcctggagaatcctatggacagaggagccttgtgggctacagtccatgtggtcgcgaaacagttaaatacgacttagtgactaaacaacagcaagcatgttctgagtctctgggtcttgactgtgcagatccctaactaggctggcttattctttgagcagcactccacgtcaggagttgcagctcagtcgtgattgtcttgaggatcgtttctgactgtggtccagctgcctcttcacagtgcttgcagcagtgtgtctgccctcatcacctccaccttgttattcttatacttattaatgttttaaaatttttatttactacgtaagtaaaccttgacaatatacaatatacaaattagttcagttcagtcactcagttgtgtttgactctgcgaccccatggattacagcacgccagccttccctgtccttcagtatcttccagagcttactcagattcatgtccattgagtcattgatgccatccaaccatcccatcctctgtcgtccccttctcctcctgccttctatatttcccagcatcagggtcttttccagtgagttgagtcttcccatcaggtggtcaaagtattggagcttcagccttagcatcagtccttcccgtgaatattcagaactgatttcccttaggagtgactggtttgatctccttgcagtccaagggactctcaacagtcttttccaaaaccacagttcaaaagcatcaattcttcagcactcgaactttctttatagtccaactttcacatccatacatgactactggaaaaaccgtagctttgactagagggtcctttgttggcaaagtaatatatctgttttttaatttgctgtctaggttggtcatagctttccttccaagaagcaagcgtcttttaatttcatggctgcagttatcatctgcaatgactttgaagcacaagaaaataaagtttgttcctgtttccattgtttccccatctatttgccatgaagtgatgggaccagatgccatgatcttagttttctgaatgttgagttttaagccaatttttcactctcctctttcactttcatcaagagactctaattcctctttgctttttgccataagagtggtgtcatctgtgtatccgaggttattgacatttctaccagcagtcttgattccagcctatgattcatccagcctggcgtttcacatgacctactctacacgaactaaatgccttgatgtactcctttcccagttttgaaccagtctgttgttccgtgtccagttccagctgttgcttcttgacctgcatccagacttctcaggaggcacattaggtgatctgcagttcccatttcttgaagaattttccatagcttgttgtgatcctcacagtcaaaggctttagcatagtcagtgaagcagaagtagatgtttttctggaactctcttgcttctgtgatccaggagatgttggccatttgatctctggttcttctgccttttctaaatccatcttgaacatctggaagttcttgtttcacgtactattgaagcctagcttggagaattttgaacattactttgctagcgtatgagatgagtgcagttgtgtcgtagttggaacattctttggcattgccgttctttgagattggaatgaaaattgaccttttccagtcctgtagccactgctgaatttccaaatttgctggtatattgagggaagcacttttacagcatcatcttttagaattttaaatagctcagctggaattccatcacctccactatctttatttatagtaatgcttcccaagccccacttgacttagtactccaggatgtctggctctaggtcagtgatcacaccattgtggttatctaggtgattaagtggagaaggcaatggcgccccactccagtactcttgcctggaaaatcccatggacagaggagcttggtaggctgcagtccatggggtcgcgaagagtcagacacaactgaagtgacttagcagcagcagcaggtcattaagtatccgtttttgagatttttttccatagcacgttcatcttgaaagttctgtattgagctgttcccttattctcaccatagtctgactgactgctcatcttaaaggttctgtattgagctgttcccctattctcaccatagtctgactgactgctcatctcgaaggttctgtattgagctgttcccctgttatcaccgtagtctgactgactgttcatcttgaaggttctgtattgagctgttcctctattctcaccgtagtctgaccgactgctcatcttgaaggttctgtattgagctgttcctctattctcactgtagtctgactgactgctcatcttgaaggttctgtattgagctgttcccctattctcactgtagtctgaccgactgctcatcttgaaggttctgtattgagctgttcccctattctcaccatagtctgactgactgctcatcttgaaggttctgtattgagctgttcctctattctcaccgtagtctgactgctcatcttgaaggttctgtattgagctgttcccctattctcactgtagtctgaccgactgctcgctgtgctttctcaagcaagtcatcagtgtcgtgtttctcacgtggtggaatacaggttctatgatcatgatcattgcttgatagaaataaacacccatagtagtgttgccccttaaatattttaaatgaccgttgattgaatgtgaataaaatgagttaaggatatggtgtgtcttttgtaggaaaagtgatatgtgtagtttaaaaataataaagtattatttgcaatatacatatattaaaaaagttcatgcagcttgaaaagtaaagcattttagaagaatgtttagtaaaaagtgaaagtattgtttgctttctctgttttaagaacagtctgggaatgaacttacacatgggagaatatttaaaaatttactcttaaaggtgacagtgtaaattatcttttcctgcttttataagcttctgaagtgtttgtctgctttttccagtagagtttattttttgttgcactttttactcctgtcttctcttccctttccctatagagagtagttgctcaccgaattgatttgacacaaaaaccaagggcaagttacatctaagtgttaagatgccagttaatgataagaaaagaaggtagtctggtggagattatcactaggaagaaaatattgatgtgttataacactgatgtagatgactagtgagaagatctgtgtattctggatatacttattcagggtatactggatgtgccagatgttattcttggcaccaagaatacatcagtgaacaaaacatacacaatttatgtcctcatgagacttagagcatatggtatatacaggaaaataagcagacaattccaacttaacatgataaatgaagatagtggcaagagagtgcttgcagtggtgaactgtggagtctgatctggatagggaagtgaatgcagaagtaggctaagtaaggagaaagtagaggaattaggcgtctgcagttctgaataataatgaaaaatagatctaacaggtttaaatagtgtagaactggaagattgtgaacagagggtaagatagtcacgtttcccatccagagaagacagaatggtgaagttgatgtgtggtcttacggtggcaaaagaggacttgcagtgaaagttggtggaagtgaaatgcttatgatgttaacagtagagttgggagttccctggtggtctggtggttagaatttagcactttaactgctgtagcccgggttcaatccctggttagggaactgataccccacaagcgatgcagtgtgttcaaaaaaacaaagcaaaacagagtgttgaatggatgtatgttgaaataattcaaggttacacggtacttaggatagagaaacttgtcatgtgctatgtgtcaagagttttgagtgaatgattaggaatgccttggggatcagtggcttgtacctgtgactgcatattgcaaaatcacctggggaactttgcaacctaccaatgttacttatcctaactttgctgcacgttagataatccaatggccagttcccagcctcagctgttctgatttaatttgtatgggggtgtaatctaggcagtgggactttaagaagcccctaggtaattgtgatgtgcagcaattgcacagtgacagggtttttatttttattttttcctttttacaggagactggctgagagttatggttaggactatgacccttcattgtgaagttggggtacttgataaatgaaagagtaacctttgagagtgctgcaggggaagcagcttttatgtaaagcaaacagtgaaactgttgatgatatagatgcatttatttttattatatagcagaataaacccagagggaggttttgggaggaagggaagcaacgggaagttggataaaggaggaagtaacaagaacagtacagtcgttagagtacaggagaggactgataactacatttatcttttggtagtgacatggcaatgataacagggcatcatgggttcagaactggtctggaaaatacatttagtggccccatggtcgatgagagttgggaattgggtggatggctctcaggagtcagtttaagacctagatgggctgaacttcataggaaatcctagctctgtattcttttctttgttaagggatgtggattggttgtgtaagatccatggagaagcccagcatttcacactgctgttccacaggctcctaggggagtgttgagaggactggtcttttttgttaccacagtagcaggaggcagctctggagtgtcagggtctggttagttccgcccagcatagctcttctcactgcttacttgtgtgagttggaccctctgctatacctaagaacagcaaaacctttgctttttttaatttttacacttgatgcttttcaggaacaattttaattgcacaactccagatttttttcagtgttgaagaaatggtgtagacttagaaacagtgaaaagggaccttgtatattacctagggaaactttatacattggaattttatgcatagaggattgagatgagtttcataaaccattcagtctggattaactaaagtataaactatatatagaactagaagtttataattgtttcactgattcaaatttgtcagaataaattagtttactgcacttcatttgtttaatttgatacataacttgacttttttgcattgttaaacttgagagatgtcaacagagtgtagcaaatttatttttcttttaaattaaaactttttaaagtataatactagtagacttcaagagctactctagttatagaaatgaactgtggaattacttctgaaagacgagtacattcaaaagcataaaaaattataatgtatttttggtcacagtagggtaagtagtatagttgttgatttggtggtagctggatatataaataaaattgtatggtaagtggaaaatatacttttgcataattacagtatattatgtcagctagtaattaaaacccatgtgcccttactaagcagaatatatgtccatgattaaaagctgttatacttttaaaaattaattgattttgtgttcggtgatcttatttcatgtttgaattataaaaggaaaattaactttttgatgttgtgacagcaagcatatgatgcctatgatgggtcataggggtttaggttacatcgaaaggatgcttttaacagccgcttgtgacatacatcttttttatatgtatcttttgtgttcatggttttcagatgtgcttagcaagatgactgaagagcagttattggtaaatgatgctcgtttcccttttctcttctttggtttgcattcattgatttacctctgtttatgtgggtgtgaatggtacccatttttctaaagctcaattgatatttattaaaaaaaaaaaaagctgcacagctactcagttggctcaatcatttgtgggcacatctcatagtttagtttgccaatacagattgaaacagttcataggagtgttattaagatatttctttggctgtggcagctgacatcatttggcttaagttttctagaccaaaattatttctgttatattatatggtgggagattctgataactcaggtcaacatttgttatgttagaatatagccaaagctgcttcctgaggaaaattttggcttgcttatgtggctttagtctgccaacttataagagttgtgagaacactagttaggctttttagtatttatggtttaccttatttttagctgtatatattattagattagggcttccctggtggcccagaaggtaaagaatctgcctgcaatgcgggagatctggattcgatccctgggttgggaagatcccctggaggaggaactagcgtggcaacccagtctagtattcttgcttgcagaaacaatcctatgaacgtggtgggctgcagtccatggggtcccaaagagtaggacgtgactgagcgactaagctcagcacagcacagcgcattaatagattaactctgaatctgcagtacagactaccaacagtcagtgaatgcaggttacataatgctcagcacctcttaaagcctgaaaaaattgatgttaaggaaaaatgcctaagagttatataatccagtctttcttctagatttgcaaatttcatttatttatttgtaattgtggttaggttctctaacttctgtccttggatatagtgtgactactagaaaattacagtcttagaacacattagttttacttctacagaattgcctttattgacttgccttttaatgtcagttcagttcagttgctcagtcatgtccgactctttgtgaccccatgaatcgcagcatgccaggcctccctgtccatcaccgtctcccggagttcactcagactcatgtccatcgagtccgtgatgccatccagccatctcatcctgggtcgtccccttctcctcctgcccccaatccctcccagcatcagagtcttttccaatgagtcaactcttcgcatgacgtggccaaagtactagagcttcagctttagcatcattccttccaaagaaatcccagggttgatctccttcagaatggactggttggatctccttgcagtccaagggactctcaagagtcttctccaacaccacagttcaaaagcatcaattcttcggtgctcagccttcttcacagtccaactctcacatccatacatgaccacaggaaaaaccatagccttcactagacagaccttagtcagcaaagtaatgtctctgcttttgaatatactatctaggttggtcataacttttctaccaaggagtaatcatcttttaacttcatggctgcagtcaccatctgcagtgattttggagaccccaaaaataaagtctgacactgttcccactgtttccccatctatttcccatgaagtgatgggactggatgccatgatcttcgttttctgaatgttgagctttaagccaactttttcactctcctctttcactttcatcaagaggctttttagctcctcttcactttctgccataagggtggtgtcatctgcatatctgaggttattgatatttctcccggcaatcttgattccaggttgtgtttcttccagtccagcgtttctcatgatgtactctgcatagaagttaaataagcagggtgacaatatacagccttgacgtactccttttcctgtttggaaccagtctgttgttaaagtcattatgagacgcagttttgttaaactttataatgactttcatgtaaaactgtctgagaacattaaccaggacttcatgctttttttttgtcccccagaaaaaattcctatttgatacaattctttaaaaattcagagctgcagatatggagcaacagttaatgagaggaagcttggatatcatctgttcccaatctgtttacagatgaagaaattgaggctcatagaggtcagctataagtggctggcctagaacccggttctagaaattgtgtcttctaacagctgacccagtttttttttcttatttaaaagttttcaaaaaattgaggtgaaagtgaaattgacataagatagttaccattttaaagtgaacaattcactggcatttagtataatcacagagatgcgcgatcacttgtatctagttctaaagcattttcatcaccctgaaaggaagattgtacccactatagctgcttcccgttttcttcccctagcagttggcagccatcgttctacattctgtcttatggattttctagttcgggtatttcatataaatggaatcacataatatctaccatttgaacctggcttctttcacttagcataatgtcctgtccccattgtagcatatatcactactgcctcattccttcttatggttgaataataaatacttttttgtaaggagagaccacaatttgcttatccatttattcattagtggacatttaggctatttccatcttttggctgtgaacatatacgtatatgtatttgagttttcagtcctagatatattcctaggagtttaatttctcagttatatggtagttgtatgtttaaagttttgagtaactgtcagtccattttacacaatggctacatgattttattaatacatacatattaatacttagtaatacgtatccccagtttcctttctacttctctttgtaaaatcatggtgacttcaaaaggaaaatgaaccgaagatcaatttgtttttttttaaggtgtcaacttttatttgatactcttataaagtagagttttcaaacaggtttatggtttttctagaggttcattgaatatgatcttgctttgttcctttcattcaaactgaagtgaagttgtgctcctccatttcttttctctcactatatgttgttagaatccataagaatggttttaggggtctgtgcatgcatgctaagttgtgtctgactcttgtgaccccacgggctataggctgccaggctcctctgtccatgagatcctccaggcgagactactggagtgggttgcatttccttctctaggggatcttccagacccagggatcaaacccgagtctcttacatctgcattggcaggtggattcttcaccactagcgccacctggtaagccctttagaggtctgctgctgctaagtcacttcagttgtgtccgactctgtgcgaccccagagacggcagcccaccaggctcctccatccctgggattctccaggcaagaacactggagtgggttgccatttccttctccaatgcgtgaaagtgaaagtgaagttggtcagtcgtgtccgactcttagtgaccccacggactgcagcctaccaggctcctccgtccatgggattttccaggcaagagtgctggagtggggtgccattaatctgtttactgtacaaaataaaatgaaaatgatgaaaaagaaaaaatagagaaaaaataatagcgaaaataatcttgagtaccttcaaggttatttataagctttgactttagtgtgggtgagatttctttgtgttctacttttgcaaagagcttggcagttgttttttgtctctttatccattctgtcactataacttacttatgaaaacagtgctttgtattatgcttgataaatgggtaatgtagaaatttcaaagtaaatggtttaaaatagggtaaatagtcattagataccttaagtttttgaataaggttgattttaatttagtttggagtaaataatgaccttctgacattattaaagtctgcctatttctttcagtatttcattttttaatttgatttttgtcataaaatgaccctaagttatatttaccaggaaaaaaaaagttaagatgctaatgtcagctctgaaagatctaattgagtttttctgttaatagagaatatattaatagaatataaacttatatctgtagtactgaggaaagaatctgaaggtcattgtttttatgtctttcgttttaaagatagagacctactgaaaaggtctttagctttatgaaaagtatgagctatgttagacttttttttttaagtatataaggcacagagattctggaattatcttcagtgatgagaattttataaggaactggagaaatttgtgaaaaaagagtcttattagatagccagacttcacagtataccagaaatggttactggaacattttatatacatacatacacacacacacacacacacacacacacacacacacaaacagatctacacacacacacacacacaaaaaaaaacagatctagctacacacacacacacacacatataaaacagatctagacacacacacaaaaaacagatctacacacacacacacacacacacaacagatctagctacacacacacacacataaaacagatctagacacacacacacccacacccacacacacccccacacccacacccacccacccacccacccacaccccagatctagctaatggttaccctgtgacactccctagcattaggcttttattattgcctatgctggcgctgtgccatcatgattagctctgttgctctctcactgctacttttattctcatcaccctcagctgacagttgcaagagattttattggctagaagacagtcaccacttactcttgattagctatattatttgatagagctattctgtttggctgtttcatagaccattaaaccagctatagaaatctaccctgtaactatggcccagtgtgatgggggtcattcttatgattcagagcatggtgatctgtacttcaggaatcccttggaagatggtttaaaccgtagtcggcaggcatttttaagaagcccaggaagggaggcagtgtatcagatgagtgctctgtcctcattggcagtttcatttttttcacatagataactatatttgcttcaggtactgctttttggatttctggtagtcttaatgattatctcaatagcaaaataatttattacgtataacccagttaagggttttaggatagagcctttttattctcctaagtttacattctccttgcatttacagaagttcacaagagacttccaaggagttgccttgagcatatctgtgaatttgttacacttacacacccctcactatcatctcaagttaatttttaagccatttaagtataagaaatatgtaattcagttccttttagaagtgagtaaacaaatgttgaccgacattttgattgcccagggtcacatgatctgtgcagagctcagattagaaagcatagctacttgtgtattgcagtgtgtggtatctatttagacttgaaacaaaaatgacttccatgttgttggcacttatctaatcttgtgtaggaatttttccagttaggacttgattgtcattgaaaggaatagacatgcaccctagttatatcacataaaatggagaatccagggtagtacagtggaatgcagctggtcctgtgggaactaaaatgctgacctaaaatctcagttctctctctttcaagcaatcacagagtctcttgtcttgtctttttagagtgttatctgcctcatttctgcttttctcacttggcttccttgcttaccgagtggcctgtatgtccccttaaaattccagtcccagaatatacataccctgtttcaggttcagtgcccatcattgacaggcggcagcttttaacttttcagattactgagaaagagtccagctcagttcgctgatgaagcccggtctcaccaagtatatcactgtgtgccttggtacacagccctggtattccttggctgtctttgcatcaggtgtatactcctggtacagtcaaggttggagatgaggcagagaaggatgggtaggttaatgcaattctcagggctgtggataagaagatgagatcgccagtatgtaagaattactgatttcatttttagttgtttgtttagtaaactactaaatagatcttattttgaatggcagagactgaataggcattatcatggaatatctctagatcccatacatttctgacatttttaagtttattaaatgtaaataaatcttaaaagtagtagctctcaagagtggagatactgcttctagggaatgtttcttttaaggattcccccctttggtcagattatttattttaatacttccctggtggctcagagattaaagcgtctgcctgcaatgcgggagacttgggttcgatccctgggtcgggaagatcccctggagaaggacatggtaccccactccagtattcttgcctggagaatcccatggacggaggagcctggtgggctacagtccacggggtcacaaagagtcagacacgactgagcgacttcactttcactttaaaattttatggtccatttttttttgtgtgtgaatgagtgtttagtctaatagaaagggagattcctactgaattcatgcatgcattcatacatatcatagaatctttgtattgtgttccaggaattttgctagctgtgggtgcattaagttgaatatggtattttctctgctcttaaagaattctgtgctttggaagctgaactgtctctaatgaaagaggtctgactctctttgtacctttgattccttcacctactgctctgtgtgtcataccttatctcacttctacattttactggatccttccctagagcctgagtgcgtgcatgtgtgtgctcagttgtgtccaattcttttgtgaccccacagactgtacctgccaggctcctctgtccatggaatttactaggcaagaatagtggagtgggttgccatttcttcccatcctaaaacctgatatatctttacaaatctgttcccactcacctcggaactactgcagtctatttttgtgtttactactctttaggtgtcactctcagttaccttctagttgtcaaatcctctggacatttactggcctttacctactgagctcttctcctttagacctgttgatcatgctttctaagattgtagggctccatccgttactggttctttttatacctttctgagcttaccttctcaagtcatcttcatgagcttcatttttccttttctgcttcttaaaatgttgatgttaccagtatttcatccttgactttctgctctcttcataatatgcttcattgtcatttttttagatgactgtgtattgatcagtcctgaatattcccttgaaaataacttgtactactatattcatttgcttgctggctgtcttcacttaggctctgcatatatctttactctgaatatgtcccatactgaacttcacttcttcatccacaaaacaaaacagcaaacataccatcccccagccctctttcttgtatcttgtttagggtgactagttgttcagtcagcttaagaagctgtgatgatggctctttctcatgttccatgcagtctattgatttgttgatcagatcttctagatatttctccagtatgcagatttctgttcatcacacctgcttttgctttatttctggcttttaggtaatatgactatcattgctctttatagattttcctgcctatttcaaatcttgcacataattgatagaatgatttaaacttgaacattgcatatgcctctgacaatctatcctttaaaaacaacttgcagtggcttccctatgggatactctgttttgcttcagcgcctgctcctcttgtcttctcattgtcagttgccctcttcttcacttggctgtgtcctgttagcctctgagattaatggtacagatcacctttctcaggaggtgtcctctgatttgtcgcccctcctcctttttaggctgttggagtacctgctccttacgagtgccttgtaatagctgatgcgtgtttgtcattttcttactgtattattttatatgtaattctcctcctccacaagattgtgagcttattgagacccagaacaatcctttacttgcagaacctgcctgtagggagcacatgctggactttcctaaatgtttgatcaatgagtgaaggacgtttctggtctagaaaaccatgcataaatcattgctatagaactttaaatagtgtggtggagacagggaatgcgaggactggaccttctagctgggaagggagaggcgcttctaagggaagacttcctttatagaagatagaagttcgagctgatttcttgaagggaacttgatagaggttttgctagaaacagagaatccatcccagagaacaaaaccaagagaacaggtcctactcatgaaaaagccaggcatttctaattcagaggtcattttggcctttggaaaaaaggaggatagaatagaggagaggctgggtggaagatggaatagaggagaagcagcaattgtagtcttgcaggcctgagcgaaggtcttatctcaggctttggtgttgaggagacggagggccatgagagatgcttaagctgtaaaatataataattagttgagtgtgagagttctaagagggcagttcaggataactcttaagatttcttttttcagtgattgattaggtgctggtatctccttttaatttaaataagggaatataggaaatttggggtatggtataaatttaattttagacatgatgagtttgaagtactcgtgagaaattcaggcaaaaacgttcagcatactgttgaatataagtgttagaaactcaggaggtgtatctggattggagacacagctttggaagtcatggtacctatgaggtagttagaagtaaacaaggttacttagggattgcatatatagcacggctgtaggagagcaaaaacagaatcctgggacttgcaggtgttgttctgcttaaagataatctggaatacttggaaaggagtatcaatttccctgtattctttccaactttatcagatttcagaaactttctctttgcagcccctgtttgttcctttcattctttgttgttgttcagttgctcagtcatgtccaactctttgcgaccctatggactacagcacaccaggcttccctgtccttcaccatctcccggactttgctcaaacgcacgtcctttgagtcggtgatgccatccaaccatcttgtcctctctcaccctggtctccttctgcctttaatctttcccagcatcagggtcttttccaatgagtcagttctttgcatcaggtggccaaagtattagaggttcaacatcagtccttccaatgaatattcagggttgatttcctttaggattgactggtttgatctccttgccatccaaggaaccctcaagagtcttctccaacaccacagttctaaggcatcagttctttgacgctcagccttttttattgtccaactctctcatcctgctggaaaagactgttggactacatgactactggaaaagccataactttgactatacagacatttattggcagagtaatgtctctgctttttactacgatgtctaggtttgtcattgcttttcttccaaggaacaagcgtcttttaattttatggctgcagttacagtctgcagtgattttggagcccaagaaaatagtttgccattgttttcattgtttccccatctatttgccatgaagtaatgggactggatcccatgaactcgtttttttgaatgttgagttttaagccacctttttcactctcctctttaccttcttcaagaggctcttccctttctaccgtaagagtggtgtcatctgcatatctgaggttattgatatttctctggcagtcttgattccagcttgtgcttcatccagcctggtatttcgcatgatatactccacatataagttaaataagcagagtgacaatatacagccttgatgtactttcccagtttggaaccagtctgtttttccatgtctggttctaaccgttgcttcttgacctgcatacaggtttctcaggaggcaggtaaggtggtctgatattcccatctcttgaagaattttccagtttgttgtaatccacacagtcaaagactttagcatggtcaatgaagcagaagtagatgctttcctggaattctcttgcttttcctatgatccagtggatgttggcaatttgacctctggttcctctaccttttctaaatccagcttgaatatctggaagttctcggttcatgtacgttgaagcctaacttgaaggattttgagtattaccttgctagcatgtgagatgagcataattgtatggtagtttgaacattctttggcattgcctttctttgggattaggacttccttggtggctcagacggtaaagtgcctgtctacaatgtgggagacccgggttcaatccctgggttgggaagatccactggagaaggaaatggcaatccactccagtactattgcctggaaaatcccatggacagaggagcctgataggttacagtccatggggtcgcaaagagtcagacacaactgagcgacttcactttaactttctttcactttctttgggtttagaatgaaaactgcccttttccagtcctgtggccactgctgagttttccaaatttactggcatagtgagtgcagcactttaacagcagcgtcttttaggatttgaaatagctcagctggagttctgttgcctctgctagctttgttcatagtaatgcttcttgaggccctcttgtcttcacgctctagcatgtctggctgtagctgagtgatcacaccctcatggttatccaggtcatgatgatcttttttgtacagttcttctgtgtgtttttgccacctcttaacatctgcttttgttaggtctgtaccatctctgtcctttatttagcccatctttgcatgaagcgttcccttggtgtctccagttttcttgaaatgggatctctctttcccattctattgttttcctctgtttctttgctttgttcacttaaagaggctttgttcactttgctattttttggaactcgtgatttagatggctgtatctttccttttctcttttgcctttttgcttctctttttttctcagctatttgtaaggcttcctcagacagccattttgcctttttgcacttcttttccttggggatggttttgatcaccacatcctgtacagtgttatgaacctctttccatccatagttctttaggcactctatcagatctaatcccttgaatatatttgtcacttccactgtataatcataagagatatgatttcatttcaattcattctttatgcagctggtttcttcttgaggctgttagtttattcctctttgaagtgtctgttgtcaaactaaactaggggaaaggaagtgcttaaatcatttatgtgaattcacatcccttcatgaaacgggcataggtattctaagtttacttctactaagaaacagactgccattttttaaacatattacattcttggtttatctttttccttttttgatagtgatatagatacagataaatagtttgcttctttctttaaaataactataaagtgataaatcacatcttggactcacatcaggtacaccttgtagcatgtgttgggactgtggcaatcccagctttgtggctcattttcttggagattgttgcaactcagctttattccattattgccttgcagaggtgattcctgatttttctgtttttcgagaaaagttattttattcttaggtgattcaaaaaaattttattcagaatttaacaaaataatgtgctggcaatttttgatccctttcttgaactttaaattctttgtatcaaagaccaaccctcatgacctactgaaatgtctgagatacctttggttctgttacatactagggtaggagaggaaacttgacttgaaagcctcagctgactagtggaaaaggagacaggctcaatcccttgattttgaagactgagtaataatgagccatgaagtcagatgggctgagacctatcccattttcagtaagtaagctggtagtgaatactccccacctcagttccttatctgctgaagttttgatcctggataccatggtcagtgacttgaaactagagtatttagttaggatatttttctattatttcattttgcatatttaagtacaaaattaaacacacacacatacaaatgcaattcgggtattttgccaccagaatgtaacccacatgaataataatgtttctgtcacttggtgggtttcaacttctgagtataatttgttagggcttgctgtattatctttatttgttttgtttgagtcaaagtaaaggctttttatagaaaaatctcttccagggtgatatgttagaactggcctttggcttttctgtttatgctccgtgggagggaaaaggaatgattcctgcaagtggaactgtcatagttttgagtatacatgttcccttttagcaacaactttcctttgtaataaattccatttgtataaatgttgctgctgccgcattgcttcagtcgtgtccgactctgtccgaccccatagacggcagcccaccaggctcccccgtccctgggattctccaggcaagaacactgcagtgggctgccatttccttctccaatgcatgaaagtgaaaagggaaagtgaagtcgctcagtctcttagtgaccccatggactgcagcctaccaggctcctccatccatgggattttccaggcgggatttcccaggcaaagttgttagatctcataattaaaaattatatttaaaaagctgtcccacaagatgttagtatttgattgttgattttgatctagctggcttttgaccacaccagattatattatgagaggaatttacacactaggtatccggaataaagacagtgattttctttgggaggagtggcgttttgatggagctagttgaagtatgtgttaatgtgttatgtcaactaaaattctgatcacctaacaattttccttaaatatattacacgtattttgtgtatgttctcttaggctttcctgtatcagagatgttgatctcttatttcctatactaagatgagagattatgaaatctgtgaaatcagtctaaataattgattttaatataatgtaaaaataggtttctttatactttatttaaagttgaatgaattttgagcagttttactgttgagtttgtacttttgggcattgataaggctggctatgactgtgtaccagttttttataattaatgactgatagtgtcttgttaccattgtctccttttgtaaaactatgttgtgcttgtgattatttatatgtagtttttaaaagactttttaaaagagcagttttaaatttgtaacaaaatcaaaaggaaggtacagagatttcacatgtgctccctgctctcacacagtctctctttcattatcaacctctctcaccagaatgctgcctttttttttttttttaaccaaagatgaacctatgtagacatgataatcacccaaagtccataatttattttggggttcaaaactcttggtattgtatgttctgttggctttgataaaaaataataatgtctatccatcattataataacttgcagggtattttcactgtcctaaaaattgtctgtgctctgccagttcatcacccagtcttataccacgccccgtctttttattgtctccatagtgttgtctctcagaatgtcatatgcttggaatcatacagtaagcagcctttttgcattcgcatctttcactctgtagcatgcatttaaagttcctcaatgtctttccatggtttggtagctcacttctttttagcgctgaacaatactccgttgtctgggtgtaccacaatttgtatatccattcacttactttaggatgtcttggttgcttccatgtttggcagttatgaataagttgatttatgtttttgtgtggacgtgagttttcagttctcttggataaatcccaaggagtatgattgctgtatggtaaagagtgtgtttagttttgtaaggaattgccaaactatcttccagtgtggctgtgtgattttgccttgctgccagtgagttcctgttgctccacattcttgctagcatttagttattctgtattttagccgttctgattggcatgtagtggcatcttactctgttttaatttgtgtctccctggggacatacgatgtggagcatcttctcatgtgcgcatttgccatctgtatatcttctctggggcttccctggtggctcagatggtaaagaatctgcctccagtttagagacctgggttcagtcccttggttggaaagatcctctggagaaggtaatggcaatccactccagtattcttacctggagaatttcaccgacagagaagcctggtaggctacagtccatggggttgcaaaaagttgaacataacttagcgactttcactttcatatcttatttggtgagatgtctgttaaaatctgtggcccattttttaaccagaatttatttccttactgttgagttttaagagttatttgtagttttggataaaaaggcctttattagatatgtcatttgcaaatatttttccctaatctgtggcttgtcttttaattatcacaataccattttgcagaagtttttaattttagtgacatctagcttatcaattaattttttcatagattatgtctggtgttacatctaaaaaggcatcaccatactcaaagtcatctatgttatcttctggagatttatagttttatgttttacatttaggtatgtggtccattttgagttaatttttgtgaaaggtatacgatctgtgtctcagattaattttttgcatgtggatgtctgattttgatagcaccgtttgttgaaaagactgtcttttggttttgtgtagttttggaaactgttcgatactgtatttatccctcacaacttactttattgccttttatagatggagtcttaaatatacttagacataaaagtataaatagccttgagcattgggcttaagttcagtaaacaaatgatattctctgtcctacttttgagtcaaagagtacttcccctttggcatactcttctgtagtgctagcattttaaaatctttgttcacttagaattttactaatcagcttccaataataccattttgatggaaagaaatgggtaactgtaaagaaaagagattgatttttcttgttcacctgcaaaactgcttttggaagacaaagcaaatttatcactactgtttaagctctggaggacttatcttttttgtattctcaaacattttgtaacttttcattatggcacttactacaattgtttatcgttccatgtgtattttgcctgcctagtttgtgagcattttgagggcagaaactgcttgattcatctttgtatgattaaggcccaatacatagctgtccagttattataggatcagtgtaacctcccaaaacaataattttagaagacagtagttcttatttaaaatgaatgcataaaatgaatgcataacccatataggatgttaaaactcattacttaaagtagtttcacatttaaaagaatctttgtcttgattgaatagccaagtgtatattgctttactgtcaactaatcacagaaatcttttaatcccaagtctctgggctatgaacatttagcatgtttgtggactgtttatttctggtattgattccttaagaaatacaagtgcatttactatgtaagtgaattttgtgattattgtgtgttttaaaaaatgttttcagtgaaaaatttcaaactttaaaagtagaaagatgagtgtaatgaacttccctctgtcacacccagcttagacatttattacctcatggctaattatattttgtgttgatcctttttcacttttcccctactgtctacttccaggattattttgaagcatattctagatcatatgattccatctttaaatatttcatcatgcatctctaaaacattaagggttctttttgttaaagcataatagctggtaccattcattatatcaagccaaaaaataaacagcaacttgttaatgtcattaaaaaatgtttataattacccagtttctcttccttctttccctcctcatcctccttctctctccactgtatttttgttataatcgaggtgaataagtttgcatattgcagtgttaaaacctgcagattctccttaaccttcctctcccctcctctttcttcccccttgccctgtatttgttgcaggaattggatcttcttccctttactgtttctcatagtctgaattgtgcttagttcatctccatgatgtattgtaacattttctcagtctttgtgcatttcctcagtcagattcaggtttgatttccccccaccccacctgcacgaaactttgattgatggtgatgttgaagctgaaactccagtactttggccacctgatgtgaagaactgactcattggaaaagaccctgatgctgggaaagattgaaggcgggaggagaaggggacgacagaggataagatgattggatcacatcaccaactcagtggacataagtttgagtaaactctgggagttggtgatggacagggaggcccggcgtgctgcagtccatggggttgcaaagagtcgaacacgactgagtgacagaactgaattgatgtgtatttttattccaagaggcatgtatgtttggttcatattctttctttctctcttttccttcttcctccctctctgcctccagtgccttacctagactgctaaatcactaatatgttcagttcagttcagttcagttcagttgctcagttgtgtccgactctttgcgaccccatgaatcacaccatgccaggcctccctgtccatcaccaactcccggagttcactcaaactcacatccatcgagtcagtgatgccatccagccatctcatcctctgtcgtccccttctcctcctgcccccaatgcctcccagcatcggggtcttttccaatgagtcaactcttcgcatgaggtggccagagtactggggtttcagctttagcatcactccttccaaagaacacccagggttgatcttctttacaatggactggttagaactccttgcagtccaagggactctcaagagtcttctccaacatcacagttcaaaagcatcaattcttaatatattagggattgcaatatggcaatattctgtcatttcttattatgtgaatttttctccttaaagagaaactgattttttatcaactctctgatcaccccagtaaatgcctaattctctaacacttttcaaaaatagttggttctttagaaccctccaaagatcagtgaaacttaaaagtatctacaatttcatgaactcagatatttgaagtactccagtccattgtggttgttattgttactgattccatttttagccaggtgaaacctcttcaggttgtctgctgagtttgacattttttcagtaatctctttagtagctttctggtatgataaagtgttcagacccatcttaaactcatttcctgctctagccttggaattagccattccttcaatagcctgagttcattttgttggaactgtcaacactatttgttactgaagcaatgattcacagtaaaattactatattttaaaatcacttggaatacttcctctatgtggtttttccacattgttagtatatacagttagactttcagatttcactttgctttttagagattgcttttgaaattctttttatgtgtaagatgtttataccaatacaaaattagatctgcagagcaaagtattttcaaagtgcctagttctcatacctatcctcttttaccccattttctccatttcttgtagatcatttaaaaaagtttctgtatatctttatatttaaaagaataagcaaatgtttctatatttataactgttaccctccctttcttggatgaatgatagctatacatacttttctttactggtatgtaattgaattcaaaaaatagtctgggtacatatgctaatacaaaaaaatttgttcaaaatgcacaaaattggcattttctaatatattgatgggtttgattagcttgcataattagatattcagctgtcttattcttttgtagctttaaaacttgctttgatcagttatttttaaggggatacttttcctttttacatgtcatttatatatacataatacatatatacacacatatatttgtttaggaatgagactgatatatatatatatatatatatataatgagactgatatatatatataatgagactgatatatatatataaattaaaaatagacatttatctgtcaaatggaaacataaggaaagtaattttctttttgataaagattacaagtttattttaaaaactctttactatttttttagttatttattattaaggcacaaaagcattgtgtgtagttagaaaactatagcttctaaaaagcacctttggttaatttatttcagcttaatgtatcttctgggccttttatcagaaattcaggaaaccttgttaatgtggttttgcagttggaggctttgagcctgctcgaagcctgtcaggactgttctttgctatactgctccatccacattttaaatacttttattattctttctgtataagggaaagcattcagtaaatgcagtcttttgttttttcaatactgtagtttcttttagactctgattccagtggttcccaatgtatgggctgtgggggtggggagaggttctgcagcccaacttagtgtgtattctgaataagcaaatgcctatgaatgtacctgttacttattcaaactgtatatagttattttgtaattgatggaatctcatttaaaagacactgaattaattgtatcactttttgttttcttgtgttttctttgtcattggatgctaggtgtgctaattacatagcagtatgtgaccttctttataactactgctctaataaaaaattaaagggtttgttaaagtagttacttacatgtgtgtacataattaatttttgaaaatatgtaaaagtttaactgtagacctccattttaagggagagagttctgttactagagaactgactacatgggcctagtgtatatgtatgtatatataacacatatatacatacatatacatatatacatatctgggcacccctggttgggagtgggaggagaaagtccacaggtacccagtggccatagtctttgccagctgggcagttgaccgtcttattagagacaaggccctctccttcctggcccagcagctggattgaaaacatgcaccatatcacgctggtgtttaatcatcctcacaaggatatactagttgtgagtggaagaggatctttatttacatgtccccagagtatcaaacggagaaggcaatggcaccccactccagtactgttgcctggaaaatcccatgggttgtggagcctggtaggctgcagtccatgggatcgctgagtcggacacgactgagcgacttcactttcacttttcactttcatgcattggagaaggaaatggcaacccactccagtgttcttgcctggagaatcccaggggtgggggagcctggtgggctgctgtctcgggtcgcagagagtcggacatgactgaagtgacttagcagttagcagagtatcaaaagagggatttgggaccaacttagctaaatgtactgatggtccctctgaggcagcctctccgtgctgcctccctgaatgggaagtagtgatgtaggctggtgtggggtatgctgaaacctttttttcaaccttttcctctttttttctttgagattggggccttgttgtgggttatgctggtaggaatgtgtagctctgcacagtcctaaggtgggagtgaggaggaggacttcaatttagggtccttttctttttcactttccctttccttttcttgccctttccttttttcctcccttttgcccttctcccgtctctttctgttacttccctcattttacttccctcattagtaaatgaattaattggttccatatttactgagcagcttctttgtagcaggccttggttaaattactgtatattgttgaatgagccaaagttcagtgtcaggagctcattctattgcaattacttaccgatgggataaggtggaaggaaaacaatctatagtttcaataaggccattcttcttctgggtacttatttttgttgttgaattcctgtatgtagtttctgtgacccaggttggcactgaagtaatatcagctttatgagtctcagccctgtctggctggctgccctatgccatgtaatgtgttgagacataccaggtgaatataactgagagtggctgagtcactctattgagactcttcagtacagttcagtcgctcagtcgtgtccaactcttgtgtgaccccatggactgcagcatgccgggcttccctgtccatcaccaactcccataggttacttaaactcatgtccattgagttggtgatgccatcccaccatctcatcctctgtcatccccttctcttcctgccttcaatgtttcccaccatcagggtcttttccaatgagtcagttcttcacatcaggtggccaaaggattggagcttcagcttcagcatcagtcctgccagtgaatatccaggactgatttcctttaggctggattggttggatctccttgcagtccaagagactctcaaaagtcttctccaacaccacagttcaaaagcatcaatcttcagtgttcagctttctttatagtccaactctcacatcagtacatgattagtgaaaataccatagctttgactagatggacctttgttggcaaaataatgtctttgctttttaatatgctgtctaagttgatcatagcttttctttcaaggagtaagcatcttttaatttcatggctgcggtcatcatctgcagtgattttggagcccaaaaaagtagtctgccactatttccattgtttcctcatctgtttgccatgaagtgatgggaccagatgccatgatcttagttttctgaaaggtgagctttaagccaactttttcactctcctctttcactttcatcaagaggctttttagttctccttcgctttcttccataacggtggtgtcatctgcatatctgaggttattgatatttctttcagcagtcttgattccagcttgtgcttcatccagcccagtgtttctcatggtgtactctgcatataagttaaataagcagggcaacagtatatacagccttgatgtactcctttcctgatttggaaccagtcagttgttccatgtctagttctaactgttgcttcttgacctgcttacaggtttctcaggagacaggtcagatggtctagtactcccatctcttgaagaattttccacagttttttgtcatgcacagagtcagaagctttggcatagtcaataaagcagaagtagatgttttttctggaactcttttgcttttttgataatccaacagatgttgggaatttgatttctggttccttaggagagtccaaagtctgttctctggaagctctgacagtctgttcttcctgtggtcgaaaatagctgtttccacttagccccactccccacatataaccgggagagtttatgcctggctctacatcaaagttacttaatcagtctgcctttgatggacttgacttgagagataatttcacaactcagctccttgattatgctagtgtgaattctgaatcaaagagaggttagtgattttgcagcggttacacagaactttagtggcaaaccggcacctgtaatttctgattctgtttttagtactgtattatgctacctttcctgtcatagaagtctgtgatgaggatcaaatgagataaatggtagtatgaattaatagacatgaaatactacaaagtaagttacttctacatgctttctactatcaggaggcatgtaagactttttacattgtcacttcttgattcttaagcatcatggcagcaggggtcattttttatgtctttgtgtgtctctctgctcaaggccaaactgatatgcataactgatatatgcatgctagtaaactgataccctttgaaaccaaaattatttccatcatttatgtaaggaatatgtggatgaactgattatctaataaaacttatactttatgtactttgtactcaaatcgggaatttattacattcattacaagtagttttctgaatgtaattcttgcgaggtatattaagctgattgattaaattaaaaaaaccactcatttatgattttaatttttttttcttactgtgacttttaacttcaggcagttgtcaactgacaatttttaaggttccttaggagtcagaatttgaatagaatcaaatcccactcttactcttactagctgtgtgaccttggaccattaaaaaaaaatcttttctgtcctttagtttctttgttgttaaactagaaataataatagtgattaagctgaaattgatcactagaccagtggtctccaaactttttgcaccagggacccatttcatggagtacgatttttccatggaccagggagaagggggatgggtttgggatgattcaagtgcgttacctctattgtgtactttatttttatttttgttacctcagctccacctcagatcaataggcattagatcccagaggttagggatgcctgcactagagcatagactcatttactacccagagaaaccatacagcatagatgaagaagtgaaggcatggagcggttacacagttaataaataatgaaagttagttttccattcagttgaactccagacttcatgttttttgagcactgtgctatattaccttctcgattacttcttaagtcgttctgaggaggacatgaggtatgcatgtagaatacttggtacagttttggttctcagaggttctggaattgtgagtaaggttttgtggacttagggattagttttggtagcattatagatatataattgtccttagttctgaacagttctggtaaattattagaaatgaaactatcacaaaccccatcccagacataatggaccagaatctgcactttaagaacctgcattttagatccttaaagtttgagaagtactgcaagagatgattttggaggtttcttccatcttacagttgtatgtcgataaccttagggaagcagacatatggatatttcagtgttgatattgtatttggagaagaaaatagtaattttaatgaaatattattttactgaaaagtattattttaataaaaatcactgttatgtggatttatttctattcttcagcttccattctgaatttgtaaaaaatttctgatgtagtacaaaactgtcctatattgtatcatcctgtgtcatctaagaaaataatcagaactcaaaaactttgaatggttttagatgaaatctttttcttaatctcactggataataagattataatattagccaaagatataaatgggaaacctaaatacaacataaaacttccttattttggacagttctctatactgacgtttcattgttcagttcagttcagttgctcagttgtgtccgactctttgccaccccatgaactgcagcacgccaggcttccctgtccatcaccaactcccggagttcactcaaacccatgtccatcgagtcagtgatgccatttaaccatctcatcttctgtcgtccccttctccttctgccctcaatctttcccagcatcagggtcttttccaatgagtcagctcttcgcatcaggtggccaaagtttcagcttcaacatcagtccttccaatgaacaccaggactgatttcctttagaatggattggttggatctccttgcagtccaagggactctcaacagtgttctccaccaccacagttcaaaagtatcgattcttcggcgctcagctttctttatagtccaactctcacatccatacatgaccactggaaaaaccatagccttgactagacggacctttgttggcaaagtaatgtttctgcttttgaatatgctgtctacattggtcataactttccttccaaggagtcttttaatttcattgctgcaatcacgatctgcagtgattttggagcccagaaaaataaagtccggcactgtttccactgtttccctttccccatctatctgccatgaaatgatgggactggaatgctatgatcttagttttctaaatgttgagctttaagccaacattttcactctcctctttcactttcatcaagaggctctttagttcttcactttgtgccataagggtggtgtcatctgcatatctgaggttattgatacttctcctggcaatcttgattccagcttgtgcttcctctagcccagcgtttctcatgatgtactctgaatagaagttaaataagtagggtgacaatatacagccttgacgtactccttttcctatttggaaccagtctgttgttccatgtccatttctaactgttgcttcctgacctgcatacaggtttttcaaagaggcaggtcaggtggtatggtatgctcatctctttcagaattttccacagtttattgtgatccacacagtctttggcatagtcaataaagcagaaacagatgatccagtgaatgttggcaatttgatctctggttcctctgccttttctaaaaccagcttgaacatctggacattcacagttcacgtattgctgaagcctggcttggagaattttaggcattactttacttactatttgaagttaaatattataagattaaccacaaaacaaatgtgcacttgacttacttgattggaaatgtttaattttgtcaatccctgtaatatagaaatttctctcagacttaattgaggtaaagggttttctgtaggttttttttcatgtgacagtaatgtctggtttgtttactgttaattcgctcgtgtttggcacattgtaggtatgcacaaatacttgtcaattgaatgaattaagagtgtgtttttttgatgacttttgctaccatcttccaacaagtaggaagagacttgtaagattctgaaaatttgagattttagacagttgagcatctcttcatgttaaataattgagttaataatctttttcagattatataattatgtttctttcttgaaaatctttttaatttttaaatttcttgaattgatattcaaacagatggaaaacatgtttatactgtttaaagcaaatgctttgttaaaaaccaggacatttgagtactgtttgagaagcccctagtgtattgtcctccaattgcatgctgccttccttccttcacctgcaaggacagccattttgcttggtttcataaaacctctgaatagtaagttgttaacttacttaagttgtaagttgttaaccagtaagttgtttagctttgaaaactggctagcaagcataaatataactttgtaaagaaggaggtcagttcagttcagttcagtcgctcagtcgtgtctgactctttgtgaccccatgaatcgcagcatgccaggcctccctgtccatcactatctcccggagttcactcagactcacgtccatcgagtctgtgatgccatccagccatctcatccttggtcatccccttctcctcctgcccccaatttctcccagcatcagagttttttccaatgagtcaactcttcgcatgaggtgtccaaagtactggagcttcagctttagcatcattccttccaaagaaatcccagggttgatctccttcagaatggactggttggctctccttgcagtccaagggaccctcaagagtcttctccaacaccacagttcaaatgcatcaattcttcagcgctcagccttcttcacagtccaactctcacatccatacataaccacaggaaaaaccatagccttgactagtcggaccttagtcggcaaagtaatgtctctgcttttgaatatactatctaggttggtcataacttttcttccaaggagtaatcgtcttttaacttcatggctgcagtcaccatctgcagtgattttggagcccaaaaaaataaagtctgacactgtttccactgtttccccatttatttcccatgaagtgatgggaccagatgccatgatcttcgttttctgaatgttgagctttaaggcaactttctcactctcctctttcactttcatcaagaggcttttgagttcctcttcactttctgccataagggtggtgtcatctgcatatctgaggttattgatatttctcccggcagtcttgattccaggttgtgtttcttccagtccagcgtttctcatgatgtactctgcatataagttaaataaacagggtgacaattgctaatattgggtcaaatctcattgaagaaagtaggttggatacattatctgggtcatggtctggtttggctttcctgagagtttataagaatgcttttcaggaaagtcagtggaaagttttatttgagtgaatcttggttgaaatagcatctgtttcttgtagttggccatctcccagtactgtaatgtggatcaggtatctgggtgttctgcagaagtattgtcagagggactaaacactctgtagtttcttctaagccaccgtggcctagttttagctcttatatagaagtcaggggaggcacagcctggttccccaaacatggagtcttgtagcctaggtcttaccttaatcaggaggaagtagtggtgggtccactggggctgttggctgtgcccctgcttgtggcctgtctgcagtccctgccccctgcccccagctttcaccaactctttactcgtggaagtcatcaggcaaagtttttactttcgagggacttcgaatcttctaccatgggatcttcttctccatgggatgtggttgggagtccagagatggttgtggttttacatggctttctaacatccagctatgattggtacaaaatttcagaaggtcagaccctcaggtttcattgagtgattgttctcaatttcctagtgtttggcctcagcaacaaactgagaccacatcactattccatattcgagcaggccagcatcgtgaaggtgctttccggcatctgggacttcagaaccgtaggatcaacctgttgtctcactactattagggatattgttgctcagaagctgttgtgtaagttcaagcagaattgatctggtctgcttaccatgtagagtttctttttgtcaagtggaggtttatttcctgagactgcctgtcctctccttctccaaaatctcagagatggaggcatgctgccaccctgcctcatgtagttgatggggaattctcttgtgatctcacacagtcttcaggctgtgcatgcacccctctgagagtgagctgtgggacatgtgggcagggatatgtgacagtgatgggaatgtggctgttgacagtctttgcagaacatcagtcagaggaagttcggaagatgctggtgggagctctgtctgtttccactcctatgcattttatctgtgggccattggatccagtgactctagggtttttggagctatgtaggagaacactgatgtggtccacagtgtcgattctggatgaccacatcagccactgtccacagccagaggatccatgggcttctggaatgcatatatggacttaagtaacccgttctgagctggacagagtagcttcccggtattaccgcctctgtttctgtgctgtgctcgcttcagtcgtatctgactcttcgcagcccgatgttctgtagccctcccagttcctctgtctatgcgatcttccaggcaagaatactggcgtggattgccatttcctcctccagaggatcttcctgacccagggatcgaacctgtgtctcttttgactcttgctttggcaggtgtgttctttactactagcattcccaagaacccctcttccttatctgttgtgtattccagttaggaagaaatgcccaaaagaagtcctggccaccaaacacttctcttacagaagtccacctgaccgacattggtgaacagcatatagtaaaaagccagcagaagctgtgagggtgacctgagagtccgccttccgttcctttgacatctgatcaagttggacttgcctttgtctttgagttattaggaagttctgatgggcagtactgctcactgatgcagaaaatttgacattcttttgcataagagtctttggaacacttctgtggacttttctgaaaagtactgatttctggtcctgattgaaattatctaaagatgctgccttcatcacccttgaatggctttgagttctctaagcgacacagcttcaaatgagagggtctccttcgtctaaagtgacacagcttcaagtgagagagtctccttcgtcgtaactttggttttggttccattagctggttctgtttgtagagattttgttagactttggtttaaataatgccgtattctaagtatactttaagactgtgatttacctacatggattatatttttatattctgtaaggatactaaaccagcagacaaataccctagcagagtagtttaaccttattaataagtgcatttcatttcagaataaattgaactaaatctaagctgtttacagaatttcctaaaattacaggatattaaagacagtagcctctgtgccagagatttactgttacttgctgttaaaactggtctttgcagctactagtggtggggctcttcatagcttagtgtgtggaggcaggtcccttctgagctggagtggagaggatggggtcttgtacagtccacatcaccaggctaaatgtttgttgactgcttaaccttgttggttgtcccagagagggttccttgtgtagcttagcagttcctgtactttacagacaggaaagtttcggaaactttaagaatgaagtctgaaaggcctataagcaaatgatgctaaatactttttctttaaagccacagtttcattgttttagttaaaacaggattattaactagtgattaaaaaatttttattagcaacttcaaatataacaactggaataagtctttattttctatatataaaaatgaattttgacagaaagaaaaaaaaggtcagggaagaccacttctgtaggtgcagtagtatccccagctgatttaaggagctgatcaggaaggcagagtagaaacttccatcagcaggcattgttgtctggttaaaaatatgagtggccaggttgagggaaaaatataaaaatatgaatgaagtagagttgtataggccttatgtagaagaaaaaataaaaaagccctttactgagggatataaaagaagatatgaataaagggaaaaatactatttggggataggaagactcactattataaattctccttaaatcttatccaagatttgttcatgtgttaatcattgaaaacttcttagaccagtcataatttattttcctccatagccttcatccccatctgatgctaattttgttgtttattcactgagctgtgtctgactgttcacaatcctgtgaactgcagttaactaggcttccctgtccatcaccaactccagaagcttgctgaaactcatgtccatcgagtcggtgatgccatccaaccatctcatcctctgttgtccccttttcctcctgccctcaatctttcccagcatcggggtcttttcctgcgagttggctcttcgcatcaggtgaccaaggtattggagcttcagcatcagtcctttcaatgaatattcagggttgatttcccttaggattgactggtttaatctccttgaagtccaaagggctctcaagagtcttctccagcaccagaatttgaaaatatcaattctttggccctcagcctctttatgtttcaactctcatttgtatactactggaaaaaccatagctttgactatacagacctttgtcagccaagtgatgtctctgatacgctgtctaggtttgtcatagctttccttccagggagtaagcgtcttgtaagtccatggctgcagtcactgtctgcagtgattttggagcccaagaaaataaaatctgtcactgttttctccttttccccttctgtttgccatgaagtgatgggaccggatgccatcatcttaattttgtgaatgtggaattttaagctatctttttcactctcctctttcactaaatatatttatttctttgtctttttttcttctggtatgtaaacttatgaagttatgtaaattcatgagagtgtgcttcttgttcttcccttattagaatgtcttatgccttgtgatagccccagcactttgaacttagagcacagaggaagcaatcaatgactggtgaatgaataaataagtaaaactttctctcataatccatagtacttattgtctattccgtagtcttttggtcattaattttgttcagtttagcatattttctattattttcttttggtttctgttgctttctattattttcttttggttcagtgtctaattgtttcattcctgtaagacattcttctccgtgctccttgatggcaggagtgggacaaatacatcctttgtatacagtacaaggcaaatggatgtaggaacttgttgactgaatacatttatttactcataataaattgctagaatccagtttgccttcaacaaaatgagtgtttttgatacataaaacaatgtatttctaaataaaataggatttgtttatagagatggaatatttttagagatgttttgttgtacttatggtaaattttggtaactgtaagttgtgcagttacaattttacaaatctctacacacaatttgagcaaaagaaaaatatcataattttcagtgagaggtggatttcttacgttgaaattttaatttttaaaaagtctcatgctatagttttaaaaaagagtattctacataagtaaaatctgtaccttttatacttgctattgcatatataaatatgtaaatatttttattataagtacttcattacttctcattccagtgtatctttcaggagtttatataactttttcttgttcgtttattttcccagtggattttttaaaatactgctgatacactatgaatttatttctacttatagatttgatacattgttggagataaatttccaataatgtactgtcaaaaataaatataaaattattgaaacagcactgtcaaatgcttaaaaggaaaaaaatataaactatgaaaaagttttgttggttcttttctagttcctatggaaagttatttatttattaaaaagatttttttcttgctttgtttcagaccagtctgtccatatggggatggggaagccttggcattgtcctttctctaataacctttggaccctttgtaatattttatttggcattttatatcctctgctttgtgggtgggtaagtattctcaatgataattctatagtttatgtcatgttcagttgttcaaaatggaaacatcaccatgatacctcagtaagaaaaaaagcatgaccatgagaaatggcagtatgctttgtgaatgctgttatttttaccaaagttaaaaatagtaaaattaagatacctatagaaataaaagtatcaatagttatgatttgtaccagcagtaggggtagttatattcaaaaataaaatttattttatggtgatataaacttttttgtataatttgaaaagttaagaattttttatttttggtgttctgtaaaatttttaaatactttcgttgaagttctgtgaaattttttagataaggcgagatatagatgggctgtagaagaaccactaaaaactctggattaaacattaaggcacatgaaaggatctgaaattccaggttcattttatgtcgtaaattgatctgttattctgttccaaattattgatctcactgaaacttgctgccacagtaaggggacttcaatttatatattaacaggcatcccccagtcatctcaggatcagttaattaagcattcccaggttactcagttacagtcaatgagaatcataattcctgagtcaaaaatctttcttattttggctctcgttatgaagaatgatggtcctttctttaatgtagctttatatagtttaatgccttatgaattttaaaagcaaaagcaggctcttgtatatattaagtaaaatagttcctataatatataaaataaataaaagtatataagtaaaataatataactgaaagtcatctaagttttactgatttttttctcattaaattttaaaaatatgtttttgttcttttgcctacttaacatgcaagtcagaagagaattaatacattttcttatggaagctaccaggtgtttttttaattggggatggttttggctagtcaaacttaagtttttgagttctgcaatttacctgtatacagtgttgataatttacctgtatacagtgttgataatgtatacattctgcttatagtcaaagctaatcacttattttgtaatataaagaaaacctttgatgttttttcttttttccttttggattgttattttaggatactttaaataccagtgtgggttatttaatggcattccgttatgtttggtcatgcagttttctacagcacctgctttttcttaaacctcaaggctgaagctatgaattaggttctaagatcaggctgttcttagctttctttcctattgttacactgtgggcaatggtgcacattttatcagtctggtttatgataatgtttttagaaatacattgttaacgtaatataagcattttattgtgtctaggtaaaactgaaatacaagaccaacttgattcttagtaatattgtttggtacaacacagatatgtgaaatttacttataattctgtggccagtcttttaaaaaagaaacagacttgaggacataaattgacttgagtgtatctgtttctccacacgcctccctgtgctgaagagcagtgaggtaacagatagctacaaaaagcagaggaccttgaaactgcctttcagtagctgaagctgactatgtttaatttttcactttctcctcttgtcactatactctttcaatcattgtaagattactataaatcattataaagttaaaatttaattttcatttatggatttcctgtctactcagtagtgcttccatttgtttggtcaattttaaatgtaggaaatactgatagcatttaatcaatacttaaagtagttctaaaccagtatttgtcttactttgactccataattgttttaaaaatagctttttgggatatatttatgtttctttttaaattccagacttatttcaaatgaattataaattgaatcatcttttttctgtatagcctttgtttatattcctggtggcaagttatctctctctctaattagttaacagacctatagaaatacatctcattcatctttatccttggttattagcttgcctgcttaattaatgaaggcttattatcctaaagtttgaaaatgttgcctgaaattcttatgaaataatattgaatgaaaacttggaaaggcattattgtataaattcacaaaatgtttatggtttttttaaacttcaaaacttaacaaaatctgtcaattccttgccttgccaaagtcacaaactgactttttagtgcatgataatccgtctgttaaatcaaaaaaatacgtgttaaattgtagtgaaattttgttttgtatctataattaaatttctttcaggggttttgttgttactctcctgtttggaaaaacaaactccgagaagtacctagagcagtgtgaacattcatttctccctccaacatcaactgggattcctaaggtaagaagggtgaaggaaggtcaaaccttaaggtcccgctgtgggtagtgctgataatgtgatcgcttttacattgcttggcacattttcctgtagttcactaatgctcactacaaatttatgagagactactgatcaggcttagaaaatgcatgttggatgttaaaagtgagcatgcaaatttgaggaaaagatgaaaatttggaatcttttcctgctgtcttaacatagaattttgattcatcacagcatcatgtcattgtcaattattgaaatgtcagtgaatgtactattttgaatgaagtaaatgcataggaaccagagtggggaaaatgggcactttttcttaaactcacttgaaaagtagagcttgtagttaggctatgctgtttctataattttgttaactcaagctcaattttatgtctttcatgttgcagtttttcttttttttcaaatatcatactatataaataaaattgaaattccatactagatgtaggcttcagattcgcaatgccttcagttactattgtgggattgtaatgacttttcttgtatgaagagaagaaaatggtctggagtcagtgccagtaactgaattttataattattaacatgtccattatgtgctaatatgactttcatattgataagtaaatacagtttttctaatacttggtgtaacctttaaaataatctctgaaacttacctctgcctccctttaaaactcctgttaatgtgtattctctgcatttgcttacacctttttgagataatgaaccttttcttttttaattgaagtatagttggcttacagtgttgtattaatttctgctgtacagcgaagtgactcagttacacacagacatgcattctttttttaaatgttcttttccattatggtttatcccagatttgatacagttccctgtgctatacagtaggaccttgttgtttgtccattctaagtgtaatagtttgcatcttctaacccagaactcccagtcattccctctccctcccctcttccctcttggcaaccacaaacctgttctttgtgtctatcattctggttcatagatacgttcatttgtgccatatattagattcaacatataagcgataccatatggtatatgtctttctctttctgacttacttcatttagtatgataatctctagtcacatccatgtggctgcaaatggcattatgtcgttcttttttatggcagagaagtactctgtactctccacacaccccttttatttagctgttgatggacatttagtttgtttccatgtcttggctgttgtgaatagtgctgctgtgaacatagaggtgcatgtatctttttggattacagttttgtccaggtatatatgcctagggatgggattgccggctcatatggtagctctgttgttagttttctggggaacctccacactgtttcccatagtggcaacatcagcttacattcccactaacagtgtgggagggttgccctttccccacaccctctccagcatttgttatctgtagactttactgatggtcattctgactggggtaaggtgggtggtacctcgttgtagtttttatttgcatttctttgataattagtgatgttgagcatcctttcatgtgcctgctggccatttgtatgtcttcttgaagaaatgttaaggtcttctgcccatttttcattgggattgtttgactttttgccttttctttttgaatcatttcttagccatccgtagtttctattcatttgaatggtacatagagaggatgatgcaaaatattttaagaattatgattttaaacagcaataaatcataagatctttatgatctattttttgatatatggtataaatagtgattttgatttgctttttctaaaatgatttataagtacattttatgaaaaaatcttgatggttgcatgggataacttgaaacttatgtttttaatgtgcatttgtgcttaaaaaattttttttgtctgtttatgactgtgctggctctttgtgctctgtaggcttttctctagttgtggcacatggggctacttcctagttgccgtgtgcgggcttctcactgtacgtggcttctcttattgcacagcccatgtgctctggagtgcgtgagcttcagtagttgcagcatttgcgctcagtagttgcggctctctggctctagagcacaggcttagaggttatggtgcctgggcttagccactccacatcaggtggaatcctcccagatcagggatcaaatctgtgtctcctgcattggcggttgtattctttaccactgagccaccagggaggccctggtttatattaattaaagagtatccaactactttttaccgtatttccaggttactgatctttctgaaaactatggacaaaagaaattaattttttttagttgctgaggaccatcccttagtaaaattaattaaaagtatgttaatttggcagctggtatactctcttgggctggggggggagaaggaaatgagggtgtgtttaatagagaccattattaatttgactcacctgaaacactaatttatggttttaaattttcattgaaatataacagtatacctgacattttcagtgtctcacattcgaaacaatgtttgctgattattattattactgaggatatctagttttgttaatttgagacatagtgtttgcttgatacctgagtctcaagaaataaggttatttattagctttaaggtaatgacagggatgttacagtgaatatttagttagaaataagctatagagattttgaatcaagaaactatccaataaaacattatgattccctttcagtgcttagaagaaatgaaacgggaagccagaactataaagattgatagaagattgacaggtgccaatataattgatgaacctctccagcaagtgagtttcagtatgtggtatttgaattccatatattgtgtgctgggtgcatttctcttgaaatactaagaagtaattttgctatttatgtaatatgctggaaattcattataatgctattcttggattctctatgtaaacttgctgccttatttatgaacttatttatatgtgtttgctttgtattaaagccttttggttgaatttacattgagaaaaaaagtttttactgacatctgatagtgtttctaattgttttaagagttaaaatgttgctcttcaaaaatttttgctcttcagttgatgactaagctagtggtttgataagtcagaggtttttctactagttttgttactttttaaaatagatattactggcttctttcaaaaatactttaaaaattaaaattattctctcccaaaatattttcattgatgctcaattatatgactattgcaaataatgtgtaccttaaaattctaagtgttattttatagataaacccttatttagtttatctgatttgcagaaaaattatacattacattgtattatttgccatttattgggtaacaatgctgttgacactgtcactggtattagaattaagtgaattatgtcatttttgtcatttgactgtaatgaatctgattatactctcaaataaaacatttttttcaagattactaggatctcttgatattattttgcatctcattccatcaaactaactaaaactcttcattgtattttagcattggaaattaatgtttctgcaagctccatctttaacctgaatttgggtagggcttcaccatagataattctttaatttaaaaaaaaattaggcagtggatgaattgggctaacaaaataacttaaaattttttgaaatgctttttagcataatgatgctcttgtaatgaagatagttatttactaccacaatttattaggtagagaataaatgaaaatttcaaataatctttttaagttttagtttgccatggttactttttaaatccttaaaaactgtattttttcctgtatttttgttttaggttatccagttttccttgagggattatgtccagtattggtattatacactaagtgatgatgaatcttttcttcttgaaattaggcagactcttcagaatgcactcattcagtttgctactaggtaaggtcactgcattgtatttatgcagaaaaatttaaatattgtttgtatcaatagggaaaataacttttaaatggagggaaaaaattggttattccaaggtaagtagagcagtagattgttattgtgggataactcttagttcatggaactagagccctgaaaagcctttcctcttttacaactgcagaatgtttatctcgactaattgctgttttctaagtctgtatgtcagtgtcttcctccggacccagttgtccaatcatgtgacagttcagagtctttcatcccacttaatgataatgctttatcccctcttacccagatactcttttttttttaattgcaatatcattcttgtattatattgttctggaaataagatttagtacagttaaactcaaagtaaatactgaaccaaggtggcagggccagatagtcagaacgtgattcagaaatctgccagtgaaagatgctcttggacatgattaggaggggtctcactgtcacagaacagtagggcgggggaggggttctgaaacatgaggcagggtcaggtcctgcaccttagacgctgaggagcttggctcagattggtgtaaggaatggtttgtattctgacgccaaccgaccgctagaaacctcagaaggtttttgttcttgttggcatttttaatattaatatttatataaataatatatgaaatatataagtatgtgcagatatagatgcagtgtgtggtgcgcatatatatctgtatatatttgtatgtctgtgtgtgtggtaaaaataaatgtaaacatataaacaggatggatcccagtcttctagaatcatttcctctggagtagcagaggaaatatttgtttgaaccccatgcagtttacatttgtcttctattggaataactagacctctttgacagttgcctggccacagaatagtataggactagtttctggcaacacaagtaagctagcttgttcctccttattggtcacaccttagcatgttcctgccaatctcccactcaggcaggctttagtaataaacaaagcactagcaaaaagatcccagaggtactgcatttccacccccttgaataagtctttgcttggcttagactgagaacccatgccccgtaggtgctggtctgactagattgtatgaaatgagtgggagcaagagacaaaatggctagagcaaaattgggagcccctgatccccacctggagatacaacttaagatgcccacagacttgcagggaagaggtgcagaggaatggagtggcagggctcatgtcttggggaaagcaaggtgtccttgcttggcttcatttaatcggccttgccctgggcaaccagagcctccatgacgccacacatgggctcttcatttcccagggaactgcatgggcttgatgggctgcaagttcttgtgcagtgggaatggtgcagcagctccacgatagcctcttcagagagcccctccccagagggctgatgatgccctgaagcctgatgctaagggatgtattcactaccttctccccctcctccatctgcggaactatttattcattccaaaggggcagaactctatcagttttgtccttcagactttcacaggagggtagctgatggttattgaggtctgcatacctgcagtcttattggtgttgctgttgaagggatggtcaggcttcactggagatggtagaacatcacagcatctccagatctttacctgggcttcttcctgcttggcagcagcatctgccttattgaggctaagtctgcactactggcagccacagttgatcagtggcatcccgtgtagtccagagagtcccaattgcttgcttctgcacatggtgaagcagatgtcagattcataaccattatcttgtagcacctgcatgttgtgcttcagctgctcacgcccactctgcccgtgttgacttctcaccaaccagtgaagccatcctccaggtccatgtactcttctgtgtgggatcagcaccaccttgtagccatccatggcggtggttctgggggatagatggggcgcactgaggttccaaagtcaccccagatagtctgctttattcaagtgctgtgagaagagctcagtgtaactgcccacttatcttaggcacatacctaatggagtcctcttagaagaactcaaaggagcagttggtggagaatattcagtttatttctttactttcagaagagaagtacattttaatgagatttcctttaagaaacttttctgagatatactaaaattctcagtttacaaacacccccttatatattgcctaaatattttggtctgtatccttgtatttactacctgatttttaaggggccatttcatgtgcagaaattatttacatttgaaagaaaggattttatctttgggtaagtttgctatctttttttttttttaatagaagatttttctacccagtacatgcagtgattttcctacaagcctatggcctcaaggcaggaggctacattgctgtgtcacaagtaggttctcaaatctgaaggtgttattctctagccagcccctcttcttccccacttaggttcttgaaatgcacttttgtacttctgagagtcttggagagtagagctttgccctagggctctttctttgtttctgtttctgtctgaatagatatttccagctcatgctgccctgtcaagacttttcttctataattcagttgatcttaaggtttagagtggaagatgaattcctcagcctccggtcactaaggcaggctgcgtaggtttcatagtttgaattttaaccttacttagattggagccccttctcttttatgattaacagcaaatatttggaaagtagccaaccgtaattatgagtgtagatacactgtggaatatagaaaatatattgacatataatcaaagaagtcagaaattggattttatgtcctttagttcgtatatgtaacattattgcatattaggtattgtttaagatcattattctgaatccgttggtcactgctttttatagtaacacctttctaatgacttttccccccctctctgcaaagatgggagtaagaagagttcattattcttttgtctgcctgcttaagattatattagaatataaaaaattttagacctagaaagaattttgaactagtaattggaagacttgagtgagtttgtatcctcttctctcatttagctatgggactgtgagcaagtattctaaattttttggattttggtttttctcatgtgggaaataagtgtcataaatacctgccctgtactgtattcctcacaaggttttggtctggagcaaattcatgtgtacttttaattcatattttgggtctactttgcctcagccagatgctgcagatacagcagtgaatgaagcaaaatccctggtcagtagaatgtaatggaaatagttcatgtgaaaatgttttaaaaattatgaagaaatttagaaatttaggtttttatgtcacccttcacccataatttcacagatgaggaagctaaattacagaaagattaagcagttggtccaagagtatctgttgagttgggggcagagtaagaatcgttcttaacagtcactgtcgtgtcccccagcccctaccagatatactgtgatctagattatcatctgtttcccccacctttctgtcatatcactgcagtgctttgcctgttctttgatcttctaactaccttttctttaaacttcctgttacagtttttcttctcccctctctagcattttattattgttcaattgctcagtcatatccaactcttttgtgaccccatggactgtagcccaccagccccctctgtccatgggattctccaggcaaggatactggagtgggttgccatttccttctctactaacattctatgctttcaggctaaatattgggtgatgtaggaagaaccaagtttcttccatcctagactgatctgaattttgtctttgcttggttgttggccttaagttttgtggcaaattaatcagcctttcttgagctttagtttccttattcataaaaaagctgataatgttacttttgagactgctttcaggctaaaaacgatatgatataaagtctgtagcatatagtgaagctcagttaatgtttgtgccttctcagtgaatgactttgtttttgtctttcattggctttttctagtaaagccatactaaaatatatgtcttcgcagggactccttgactatttccattgagaatatcaagaaaattaagtgcttataatcattacttgaatatttcttgaattcttattcttgtctgctgtgcactgtgaagcgtacattatctcttctctccttcaaatttcagtcttgtagtttttaaccaggggcccatgaagccttgaagatttaagcaaaattttctgtgcttttttttttcttctgagtggttccatagattttattttcaaaaagggcctgtgaaccccagaaagatttaaaaccaccaaattctagtgttcatatttatttggcaccttgaggaaacaatcacagaatattggcatcaaacaaaatgctaattttgttataacaggaggaaaaggatatatatagagtctgaagttctgcttttgagctttagttttgttatttattaagctctatggcactggaaatagatggggaaacagtggaaacagtgtcagactttatttttgggggctccaaaatcactgcaaatggtgactgcagccatgaaattaaaagacgctcactccttggaggaaaagttatgaccaacctagatagcatattcaaaagcagagacatgactttgccaactaaggtctgtctagtcaaggttatcgtttttccagtagtcatgtatggatgtgagagttggactgtgaagaaggctgagcgccgaagaattgatgcttttgaactgtggtgttggaggaaactcttgagagtcccttggactgcgaggagatccaaccagtccattctgaaggagatcagccctgggatttctttggaaggaatgatgctgaagctgaaactccagtacttttccaactcgtgcaaagagttgactcattggaaaagactctgatgctgggagggattgggggcaggaggagaaggggacgacagaggatgaaaatggctggatggcatcactgactcgatggatgtgagtttgagtgaactccgggagttggtgatggacagggaggcctggcgtgctgcgattcatggggtcggaaagagttggacacgactgagcgactgaactgaactgagctgatggcactggtggtgcagcagtaaagaatcttacctgccagtgtgggagatggtggtttgatccctgggttgggaagatcctctggagaaggaaaggcaacccattctagtactcttgtttgggaaattccagggacagaggaacctggcgagctattatagtccacgggtcacaggaagtcggacatgacttagtgactaaacaacatgaccttgaatggataagaaacataaattctttgcatctagtgataacctgtatctgcttatcaggttgttgttaagattaaatggcatcagatatgagagaatatactgtaatgctaacacgtcatcctaaccttagtacctgtttctagtagcagtttggggaaggaaaccttcccagggagctctttagttctctgtggaacctggacattaagctggaactttaggggttgaatctgtgataacctgtatatttttaattctctcttcaaataggatagcatgacattggagagaaagccctgggaaatctgtattgtaattctacctgtaccattaagttatagtatacttagaaaatttcctaacatatctgtaaaatactgctactgatacttgtcacaaactcttgagttgtgaggggcaaatgagatgatatgcaggtaatatttcataaagtgtttatcaaccagtcagtgatatttttgagcaagttatttaacttatttaactttctgtgcctcaatctcagcatcagtaaaatgaggtaatttcatagtgttgttgtaataattatatgagagaaaagaacatgtaaaacaccataggaatctggcacatagtatgtattcagtgaatgttaacttctttcttgttgtttttgttatttcttacattcctgggaatatatgcacacagattctcttgtcttcttagcttcattgtcttttgagggggaagggcagaggaaacaaaattaaaacacatgaaatagagagaaagtggttatttgggtggtgtttaaaggatttgatctagagatagaatggagcagagtacctgatcaaaacctgatgtggattgaggctaaaactggacttcaagaatgggtgtatagaggtagaggttagtggttgattgtatatttttataattcttacaccatactgttcacccactttaagttgttggctcttagtgtattcagaattgtgcagcctttatcacagctaatttaaggatgttttaatggccccatcaagaaacatggtatccactaatcagtctcttcccatatcccccacaaggcttctacctctaggtagtcaactatatattttttctatgtctttattgacattttacctggatgaaataatatatgatcttttgtgactagcttctttcacttagtgtactgttttcaaggttcatccttgttgttcagttcagttcaactgcgcggtcgtgtccaactctttgtgacccggtggaccacagcgtgccaggcctccctgtctatcaccaactcccggagtttatcaaactcatctccactgagtcagtgatgccatcaaccgtctcatcctctgtcgtccccttctcctcctgccttcaatcttcatccttgttgtagcatatattattacttacgccttttcgttgctgaataattttccattgtatggacataccatgttttgtttatccattcatcagttggtaagcattggggttgtgtctattttttggtttttataaagcatgctactatgagcattcatgtacatgtttgtgtagacttaatgttttcatttctcttagatgtataccttgaaatgaaatttctgggttgtatggtaactctgtttaatcttttgtggaactggaaacttttaagaagtggctgtccattcctgccaacagtgtatgagtgttccagtttctctgcccctttgcctgtacttgttattgtctggcttttaaagtggtatttcattatggttttgatttacctttccctgatggctaatgatattaagcatcttttcttgtgctaattagttatttgtatatcatgcgcagagaatgtcgttcagagcttttccctgtgttaaaactaggccattgttgactgtactgtattgcttcctggttttataaatacagttttattgtttgattggacagttgtgctcatttgtttgcattttgtccatggctgcttttgtgctatagtggcagaactgactgagatgatgtggcctgcaaagcctgaaacattgctgtttggctctttagaaaaagtttgcatccattaaaatattcaggtcaggtcagttcagtcgctcagtcgtgtctgactctttgcaaccccatgaatcgcagcacgccaggcctccctgtccatcaccaactcccggagttcactcagactcacgtccatcgaatcagtgatgccatccagccatctcatcctcggttttccccttctcctcctgcacccaatccctcccagcatcagagtcttttccaatgagtcaactctttgcatgaggtggccaaagtactggagtttcagctttagcgtcattccttccaaagaacacccaggaccgatctccttcagaatagactggttggatctccttgcagtccaagggactctcaagagtcttctccaacaccacagttcaaaagcatcaattcttcagcactcagccttcttcacagtccaactctcacatccatacatgaccacaggaaaaaccatagccttgactagtcggaccttagtcggcaaagtaatgtctctgcttttgaatatgctgtctaggttggtcataacttttcttccaaggagtaagcgtcttttttctcttactgtttgctattctcacatatttacagattttaacacacctaaaatcatacagtgtacaacttctttgtatacttcttaataattaagaagtattattcaagaaataggaaaaatattggactaaaactcatacaaagaagttgtacactgtatgattttaggtgtgttaaaatttgtaagtatgtgagcatagcaaacagtaagagaaaaaatagtaaaatattgacagtgatctttggattgtggatgtttggctaatttatgtctgatatagaaaaatctaaagaaagaaatgacattttacaaaataggcatgcattattcttgtagcccaagacaggaacatttggtgctcagcactaaaaaaaaaaatatctaggatgacttttttcaactaaattttttttcctgttttttatattattacgagcacataaataaaagaatccttttttcagctatatatgacatgttttgtacagacagccattgtatccttacttccttgggaagttatcttgaaattagtgcttaaatatggttgtttttgtacataatggggtagtcagtactcaatagattattgttaactgagtttccatttatgacttcttggtaattttttttcccacagaatttaatgtatttcactgttgggtctacgaatgtttcatttatcagataaattttactgaaaaccatgtttattaaaatacttaagaacatgaatttaatttttagtacataacattatacttaagatgcacacttagccccaggttgttatttatttatctatttttttcatgtagcttaaggtttccagctctgtattttttgtactcaacctctaaaataggtgagtgtgctttatgtgtgtttttctaattttttctttatatttggagattgaaggtctttagaacttctgcattgttgacctctttgaagcattggtgccaaagatgtagaactggatggatttcttatgtggagttgtagttcactgagtaccatttccatactatggttacataaaactgcaggcccagagttttctccatttctaccaatttgtttataacttttatgatcagaagatttcgtgtagttcaaggtgtagcagataaactgaattgaaactcaggaatcctgtttttgttttaatgaaacttttatctcattaactaatctggaataagtaatttatgtttttgatttgtggtaattctttcagatctctttcagttctgaaatactgagattccctgattggttattactaatcttgatctgtttgccttcactcatatctcctcttcaaaacactcacattctttatcacaccccacattttgaataccatttggagagttatttttttagatttaatttactttgggattagtgtacttatctggtctgctgttttactggtagtaaatcttaaagtaggatgatgataaactatatttaaaccttttattacatttctgcatggtcagaaaggatgcaagacttcaaacatttaagatatttactagaccaatcttttccctatagttaagcagttttgtatcaatgaaacttgacagttttttgcttgattatccaaactgctgcttttctctatagaatactaaaacaataaatttgtagttttgtaagtctgctactttaagttcccaccgtggttgattttagctgtgagcataaagtcactgcatgtggggttgggagagagatgtgctcatttggctctccccctgcagcacatggggcttcccaggtggagctagaggtaaagagcccacctgctaatgcaggaggtgccagagacatggattcgatccctaggtcaggaaagatcccctgaggaagtgaatcccatgtgcagaagagcctggcagactacagtccataggatagcagagttggacttgactgaagcgacttagcatgcacgcatgctgcagcccacagggggaggaggtgcagctgagggaagggtgcagactaatcagaaaccataaactagtgaaacttgtgtcctcatggttgctaattgagctcctgtgaaagagtgatgctccatgtatttctgaggattatggtagagagtgttcataagtttaatgtaaatttaggaatgttgtgaaaaaatcagtttaattattttatactcagtccttataactaaattcttgaagtagtttttaaaagggaagcaaagatgctttagggaagtggttatagtaacttgaaatatttataagcaaattgatattggaagaagggaaagtctttaaatggatttagaagcaagtttacaattctttgcttttaaaatgttgctcaaattcaattttaggctgaagcttttgatgctaacaaagtactccctcaaggactcttaaggatggaaacatgtaaaagtttatgtattttaaagagtatatatcctttatgatagtgaattctgagggggttaactgtctgattcagtgactcaaggaaggaatttttttcttttacagataggtcactcacttttggcaaaagtggctgtgagtcaggtgatcataaaagctagtagaatagaacttctcaaaatgtcttcagagatgcttgtcaaaatctacccagtaaaactaggaattttgctagtgatttttaaaaaaaaaaagtctgatatttctttagaaggtaaaagacctcatttaggagattaatacatattactgtattttatgcagttggttattatattgcccttattgattaatatatattttaaaagcctttatatgtgataagtgtgtatgacttttgatatatattcagacatatacaaacacgaatactatacagtgtatatactatgcaatatactgtgtcattcttaatgttttaaaataatatcttagtaatcattcctgtgaaaaaataatatagcatcaggaatgaaacatttatcataggattgtttctgtgggaagatcagctgactgttttcattttgatataaaggaccttttccaggacagtgttctggcaagtgggtgaagattgcctctactgcccagaaatcacccacttctttagttaggcaagtctacatgatgactgcatgatcaactacgggttgatcatgctcattcccgtcttttgcttgttcctatatccttactttccctgttaaatggtactcattcatcaatcatgtactcattcatcaatcatagtactcattcatcaagattttttaaattcatcttttaaattcatgacatagcacttaacttctgcacttaattcattcatgacatagcacttaacttctgcttatttctgtgtgtgtgagtatttaaaaaaaaattgtaaactctttttggaatggtacaagttctgtactactgtagtagaaattctctttagttagccagtccattccctttgttacgacatactgactcatgcccgtagcattaaagctaggctgatagactactttcttgtacttctgcccatttctgttcctactttctgagatttaaacttatcaaaagtcacttgtattaatagattcttgggcaaagaaagcttcatataataggtctgtggtatgagctgaacatggatgagcaagacaattgactctgttaaaaaaggaagttgtaccctggttatactttttattataatcatataatttaatttactcctattttgaagaaatatgagtatgacagggcattcctgtgaaaatgaggtcacttgctttggaatttactcagagcaagttgctaaatagattgcagttgaattaggtgtgcaaaagacaactacaaaatactggtgaaaagccttgaaagactcttactctgtgttcagatttgtttacaaatgtccttagttgttctgtcatttaaaagaaactggaaatcataacttcttcagtgtgagaatgatttattcaagacaaaggctacattaataacacttagcaaaatgttaatcaaaaggtcttgtcttggtcttacatcgagtgatttatatgattgaagttaaaatgacatacattcatgattccctcttttgatcagatattttatttacccattatcacttttccatgtactgtgttcctgtgtgcatgtgtatgtatgtgttgtatttgggtaatcatagattcttaaagctgtaagtgtccctagagaaaaaccgtgggatgtgatatgacttgctgaatttcacaactactgaaatggtgtgtcttttacttgaatcaagggcatgtatgccagtccaggcctctttatagaagtctttaattgattttgatgtgtgttttgtattcctgatgatatgctgtatactgcttagaatagatggaaccagtgaagcaattttgtaatctcagtctcagccccatatttgggacattcattgccttttttaggctttagcattaagtagctttaggttttagagagggggaaaagagcttctcaatcaatgtgtgtcctatttcagaactttaaggagtaaggaagaagctattttaggtggttcgtgtggccattctccaggcacctgttaacagtgctctgaccctgaaagagaaatcagtaaatcagtatgtattgagtgcctccagtgtttaacatattatttagccattggggacaacactgtgaataaaaaaaacacagtggaataaaacagatgaaatccctgacttatctcagcaattgaattatttaactgcacattctaagtactctagaactaagcactgtaaccagagatctctcgacctagtgtgaaggagtacagcacagggtgagggtcaatgcagggtgctgtgtgtggaaccaacattttagataaactcgaaagtatacatgggaattgtcaggggaacgtggaggagagaaagtaaatttgtagggagtagacagggtgagcaaacttggcagaggaaatagtctgtccagaggcactgagataagaacagaaccaaagaggaaggaagagagcaaaacagacaatgaggaagtaagcagggacccagatatgcatgatcagggagtcattaaagtatttttaaagctcttgttttgtattatcatctttgtatttttaaaaagatcactctagctgctctatggaaaataaaatgaagggagagacaagaaaggacatgggagaccaattaaaagtccaggaataagatgctggtattagaggtgaagataaggcatgcctaatatatattcagagaggtacactttatagtttgactgttgcttttattctttgagacttcatttcttatttgcattcctggttaaccattataattcatgcagtcattctatcaagatatataagcttcaggaacctactgtaaattttatttttgggggtagggttggatatattccttattctcttggtcatataggaagtatgctctcatttttaaattcaagaaatgaaagcttctaagtagtaataaaatgaaagtatagataataggattcattgtataataatctagatgtttttactagaagacatgtggggaaatattttaaacaaaatgaaaaagagccttgactgaagtcatgatttaaaaataatagtatcaagaactcaaatagaaagctatttgtagatcaatagaaggaaatgtggctattaaatacattgaatgatttttaaatttatgtttatattgcacttgctatatattagtcatataccgtaattttaggaagtacttcactgtcgacaaaatgttttcaaattataaggtaaatactactagaaatcattagtagatattttcctaatttataagtgggcagtcatgtattactgttcttcttatcttccttacatagaataattcctttgaattgagatttacattaaatttggatgtattcagtgaaaatgagtcaagcagagggaaaataattaccttggacagggaatatgaactgttctgcttcctgttttcctcacctcaatgtatttgtatattgaaagtagaaatctgcatttagtaattaaaataattttttatatttacattattgattaacttccagtcatgttaaatattacttttacatccttttatatcttcttcaaatgtttcatttacatcttcgaagatgtattgagataggttttagaatgccttctaaaattaatgaatttattttgtttgaatttcagtaaattctataacagcactatacctgaaacagaacacatacaatttgaaagattatacttctaaatttgtgaatatgaaccttttatggattaaatgaatttatggtctataccaagtaaattttgttcttatacaaattttcaagtttggatgattttttacaaatattcatgtaaggatttttgaaagatgcttacacagatagtgcttttctctttaaaataagaaacaaagattctagagacctctaagtctaagtatttaagttttatgttgagactgaatattgctatttagtgtattcttacatacatggttcatgtagtctaatgataaccccctctgcaaatctgagagctcaggttacctttatttttattaagttgacttgtatttcatgtacttataatttactttccatgtgtataatacattataattgcacattaaacagtatattaatgttaatactttgtttttatttgaaaacagccatctgtgatattcctcagtgctgttaccacatttataagatttttctccaaaaatagtaatcaaattaacttcagttcagttcagtcgctcagtcgtctctgactctttgcagccccatgaagtgcagcacgccaggcccccctgtccatcaccatctcccggagttcactcagactcctgtccgtcgagttggtgatgccatccagccatctcatcctctgtcgtccccttctcctcctgcccccaatccctcccagcatcagagtcttttccaatgagtcaactcttctcatgaggtggccaaagtactggagtttcagcttcagcatcattccctccaaagaaacccagggctgatctccttcagaatggactggttggatctcctcgcagtccaagggactctcaagagtcttctgcaacaccacagttcaaaagcatcaattcttcggtgctcagccttcttcatagtccaactctcacatccatacatgaccactggaaaaaccatagccttgactagacagaccttagtgggcaaagtaatgtctctgcttttgaatatgctatctaggttggtcataacttttcttccaaggagtaagcgtcttttaatttcatggctgcaatcaccatttgcagtgattttggagccccccaaaataaagtctgacactgtttccactggtcccccatctattacccatgaagtgatgggactggatgccatgatcttcgttttctgaatgctgagctttaagccaactttttcactctcctcttttactttcatcaagaggctttttagttcctcttcactttctgccataagggtggtgtcatctgcatatctgaggttattgatatttctcctggcaatcttgattccagcttgtgtttctttcagtccagtgtttctcgtgattcactctgcatataagttaaataagcagggtgacaatatacagccttgactcactccttttcctatttggaaccagtctattgttccatgtccagttctaactgttgcttcctgacctgcatacagatttctcaagaggcaggtcaggtggtctggtatttccatctctctcagaattttccacagtttattgtgatccacacagtcaaaggctttggcatagtcaataaagcagaaatagatgtttttctggaactctcttgctttttcgatgatccagcggatgttggcaatttgaactctggttcctctgccttttctaaaaccagcttgaacatcaggaagttcacagttcacatgttgttgaagcctggtttggagaattttgagcattactttactagtgtgtgagatgagtgcaattgtgtggtagtttgagcgttctttgacattgcctttctttgggattgggatgaaaactgaccttttccagcgctgtggccactgctgagttttccacgtttgctggcgatgccatccagccatctcatcctctgtcgtccccttctcctcctgcccccagtgcctcccagcatcagagtcttttccaacgagtcaactcttcacatgacgtggcctaagtactggagtttcagcttcagcatcattccctccaaagaaacccagggctgatctccttcagaatggactggttggatctccttgcagtccaagggactctcaagagccttctccaacaccacagttcaaacgcatattgagtgcagcactttcacagcatcatctttcaggatttgaaatagctccactggaattccatcacctccactagctttgttcgtagtgatgctttctaaggctcacttgacttcacattccaggatgtctggctctagatgagtgatcacaccatcgtgattttccgggtcttgaagatcttttttgtacagttcttctgtgtattcttgccacctcttcttaatatcttctgcttctgttaggtccataccatttctgtcctttattctgcccatctttgcatgaaatgttcccttggtatctctaattttcttgaagagatctctagtctttcccaatctgttgttttcctctatttctttgcattgatcgctgaagaaggcttatctcttcttgctattctttggaactctgcattcagatgcttatatctttccttttctcctttgcttttcgcctctcttcttttcacagctattattaaggcctccccagacagccattttgcttttttgcatttcttttccatggggatggtcttgatccctgtctcctgcacaatgtcacgaacctcattccatagttcatcaggcactctatctatcagatctaggcccttaaatctatttctcacttccactgtataatcatatatgatttaggtcatacctgaatggtctagcggttttccctactttcttcaatttaagtctgaatttggcaataaggagttcatgatctgagccatagtcagctcccagtcttgtttttgttgactgtatagagcttctccatctttggctgcaaagaatataatcagtctgattttggtgttgagcatctggtgatgtccatgtgtagagtcttctcttgtgttgttggaagagggtgtttgctatgaccagagcattttcttggcgaaactctattagtctttgccctgcttcattccgtattccaaggccaaatttgcctgttattccaggtgtttcttgacttcctacttttgcattctagtcccctgtaatgaaaaggacatcttgtttgggtgttagttctacaaggtcttgtaggtcttcatagaaccgttcaacttcagcttcttcagcgttactggttggggcatagacttcgattactgtgatattgaatggtttgccttggagacgaacagagatcattctgtcgtttttgagattgcatccaagtactgcatttcagactcttttgttgaccgtgatggctactccatttcttctgagggattcctgctcacaatagtagatataatggtcatctgagttaaattcacccattccagtccattttagtttgctgattcctagaatgtcgatgttcactcttgccatctcttgtttgaccacttccaatttgccttgattcatggacctgacattccaggttcctatgcagtattgctctttacagcataggactttgtttctatcaccagtcacatccacagctgggtattgtttttgctttggctccatcccttcattctttctggagttatttctccactgatctccagtagcatattgcgcacctactgacctgcggagttcctcgttcagtatcctatcattttgccttttcatactgttcacagggttctcaaggcaagaatacagaagtggtttgccattcccttctccagtggaccacattctgtcagacctctccaccatgtgtacttttttttttctcctttattgctcagcatctttatgaatagactctttgccttctatttggtatgttcctaaagggatgaattaattttagtgttaatataaagaaaacagcattgaaaaaatgcttgtttaaaaataccacttaatcaaaagagatgtgtaatctgttttgtatttatctattgaatttgttatgtttcactggtgtgctagattagcggtatttgttgaagtcttcttttataatagtactaggtagcttaataaaattagttaccacctttttcaggggtaagtgtggtattttatacattattctttaaaccatttccaagtgactatagttattttgaatagttgagtttttaagtgtttatatatgcaaacagaaaccaatcaggctcacaccaaaggtatttggttcaaaacttggagtgtataactaaatggaagaatgtggagaattcagaaaggattaagaaagaatcaaaaatcccaagtgctcttttaaaaacaagcaaaagcattctcagttcttaatgtgttgttatgtctgggatgagaagttgcctattgtctttcctttttttttattttaagcacttagtgcttttaagcttcaacacataaaatacttcaaagaatactggttcaagagtttaaatggatttgataaactatggggcttttgaaaaggaatgctaagatgtaatactaattaaatggacaaaatctctgtctgtgatgatcatgttgtttttcagtagtcattgaataaatttatttttgatttaaaaaagtcattcttttatgtaatgtgtttgttataaggtctaaagaaatagactggcaaccttattttactacacgccttgtagatgattttggcacacacctacgagtattcagaaaggcccaacaaaagataacagagaaagatgatcaagtgaaaggtaataatatctttatcccctttgaaaattaggattttaaaatctggttttattattctctaatcttgaattgttccctttctgtccaggtacagcagaagatcttgtagataccttctttgaagttgaagttgaaatggaaaaggacgtttgccgtgacctagtgtgcacttctcccaaagatgaagaaggttttctttttaatttaactttttgagcatattaactgttcacattagtagagtcaagcagaaccattagcagaaccatttaacaaataccagggtaaaatctaagagtaaagttattcttacaggacaggaagcttagtaaaaacactacttttaactcttaaaagtaaatttccagattcttttttcctttaaaaagagctttttcaattaaagagaactacttttgttgtcttttaaaatatagcagacacaaacattttatccttatgaatttactttttttgatctgtagtaattttatcttcatcttgagtttactatttctaattcaagagtacacctattatcataaatattttctaagggaatgatgataatgtttcaaatgacatttatagagttggattgacttttctttttgagaggttagaccagataaattttagctgaggatgttatcttttcctagttttacaataaccgagtccgtgctacttggcatattgttttgattatcagttatataattaccttcccaggaagtgtcagcatatgaacaagtcagaaaagcattgctagttgtggaaattgttttcttagatttttaaaatgtgctcagcttttctatttctttgccttcttttctgttcttttccttttttcttctttcttttttatgtttattatgcaattcagtttttaattgctactactttagcattaatatgaaataaccaaatgtaagaaatagttagaatgacgtatagtgcttttatgtaaatcaagccctcttcaatcagtaaaatagaagagcatattctttttcttattacctgccaagttagtggaggttttttcttggaaaagaattgtaagtatatttttaaatgtgcagataacttcagtatgtagagatgtgtggtagaagagtagaatacttggtgcaactgaaacttttggggaaaaacacttctgtaattgaagtttctcaacaactcaagatgtagggttcagttcagttcagttgctcagtcgtgtccgactctttgcgactccatgaatcgcagcacgccaggcctccctgtccatcaccagctcggggagtttactcaaactcatgtccatcgagtcggtgatgccatccagccatctcatagatgtagggtagaactgggcaaagtaaaaaagtgtgtattactttgattaatgaatatttgctatttggagaataacaaagatttttattgaatactgattaattactaagataataagcttgtataattagcaaactgcttaatcctgccactttgtgttttatatcaagagtaggtggagattttgtattttctgttgttatagctcccttttttttttttaatttctaggattcctaagggatttgtgtgaggtcttattatatttattgctacctcctggagatttccagaacaagatcatgcgatactttgtcagggtaagcttaaacacgtaacaaatacatgactctaaagaaacttagagtagtaattaccaagtttttggtcccaggaccctgttacacacttaaaaattattaaggaccccaatagcttctgtttatgtgggctttgtctatcaatatttattgtattgtaaatattaaaactaaggaattttggaacacagaaatacacaagcatattccattaactatcctgctccattctgaaaatactactgtttgctttcctttcgctacaccctagaggttcctggacaacacctctgttcctaaactgtgcttttttgcttattattatttaagcagtatcaatttagcagtatcctgatagctctctaacttcagttcagtgcactttcaggtagggtaatgatactgtgaaataaatagaaaatgcttgattttgatgagaagagtttgatagattttatacattgaagacttgggctggtcattgtcaacatctggcatgtctatgtctagattcacatttaccactgaaggaagatactgttaatcagtcatcatattcattcatgctgattatttggagcaatctttgcctgtctgatactctgcttaacttttaaatagacaagttgtgtcttcttgctcatccttccctgtgactttaaacaccatccaaatgctaataactttcaaatctatatctttcccttctgaactgtccaccagctgcctactaaaatcatatttcattgatgcacagcccttttaaactttgcatgcacaagatggaagtcttactcttgcctccaaatcctgtctaccttttataagctttttcttcatccccgtaatgaccacccagcaaatgttttaaatcttaagtcctttaaaaagggactgtgggtgagtggctttgtttaacctctctggccttcattccatgccatcactgtattccaaccacacagacttttccaaagtgccgtttctctccactataggattatctcatactcttttttttcatctgcttagaatgatttgccttattcttttggctaaattacatttgtccctcatatctcacttcctcagaaatacctccttctctaaaagccccctcataattccctattagtataggtaggtactgtattccttcttaacatttaccatattttaacatgaaagtttgattgttgggttaacttgcctgatgcctctttcccctaacggaatcccaagccctacaggacaggggccatttcttcatttctgtattctgtatcactgtgtagttactggttttcacagtgcctgccacataacatataccaatcacataatcagttttaatgcatagttcagtagagttgagtcgttcagtcgtgtgcgactctttgcaaccccatggactgcagcacaccaggcctccctgtccatcaccaactactggggtttactcagactcatgtccattgagttggtgatgtcatccagccatcttatcctctgttgtccccttctccttctctttcagtcttttccagcatcatggtcttttctaatgagtcagttcttcacatcaggtggccacaagattggagtttcagcttcaggatctgtccttccaatgaatattcaggactgatttcctttaggatggactggttggatctccttgcagtccaagggactctcaggagtcttctccaacaccacagttcaaaagcatcaattctttggcactcagctttcttcacagtccaactctcacatccatacatgactactggaaaaaccatagttttgactagatggacctttgttggcaaagtaatgtctctgctttttactatgctgtctatgttggtcataacttttctttcaaggagtaagtgtcttttaatttcatggctgcaatcaccatctgcagtgattttggagccccccaaaataaagtctgacactgtttctactgtttccccatctttttgccatgaagtgatgggaccagatgccatgaccttagttttctgaatgttgagttttaagccgactttttcattttcctctttcactttcatcaagaggctctttagttctccttcactttctgccataagagtggtgtcatctgcatatctgaggttattgatatttctcccggcaatcttgatcccagcttgtgcttcttccagcccagtatttctcatgatgtactctgcatataagttaaataagcagggtgacagtatacagccttgatgtgctcctttcctgatttggaaccagtctgttgtttcatgtccagttctaactattgcttcctgacctgcatacaggtttctcaagaggcaggtcaaatggtctggtattcccatctctctcagaattttctacagtttattgtgatccacacagtcaaaggctttggcatagtcaataaagcagaaatagatgtttttctttattgactctcttgctttatccatggtccaacggatgttggcaatttgatctctggttcctctgccttttctaaatgcagcctggacatctggaagttcacggttcacgtactgttgaagcctggcttggagaattttaagcattacttgactagcatgtaagatgagtgcaattgtacattagtttgagcattctttggcattgcctttctttgggattggaatgaaaactgaccttttccagtcctgtgcccactgctgagttttccaaacttgctggcatatggagtgcagcactttcacagcatcatctttcaggatttgaaatagctcaactggaattccatcacctccattagctttgtttgtagtgatgcttcctaaggcccacttgagttcacattccaagatgtctgactctaggtgagtgatcacaccattctgattatctgggtcatgaagatcttttttgtacagttcttctgtgtattcttgccacctcttcttaatatcttctgcttctgttaggtccataccatttctgtcctttattctgcccatctttgcatgaaatgttcccttggtatctctgattttcttgaagagaattctgctgctgctactgctaagtcacttcagttgtatccaactctgtgcgaccccatagatgtcagcccaccaggctcccccacccctgggattctccaggcaagaacactggagtgggttgccatttccttttccaatgcagggaagtgaaaagtgaaagtgaagtcgctcagtcgtgtctgactgttcaggacccgatggaccacagcctaccaggctcctccatccatgggattttccaggcaagagtactggagtggggtgccattgccttctccatgaagagaacactagtctttcccattctgttttcctctatttccttgcactgatcactgagcaaggctttcttatctctccttgctattctttcgaactctgcattcaaatgggtatgtctttccttttctcctttgcttttcacttctcttcttttcacagctatttgtaaggcctcttcagacagctattttgcttttttacatttgtttttcttggggatagtcttgatccctgtctcctatacagtgtcttgaatctccatctatatttcttcagacactctatcagatctaatccctcgaatctttttgtcacttcttctgtataatcgtaagggatttgatttaggtcatagctgaatggtctattggttttccctactttcttcaatttaagtctgaatttgacggtaaggagttcgtgatcagagaggaaacctaattgaccttgttgctggctatggggcacatgctactgctactctttaaaaattaaactgacttttaggagacaggaatgacgatcagtactgttacatgggtttaaaatgtttaaaataagtagggttgtttaaagaaagagcaaatatggtttgccatagattgctcttttaggcaatatttcatttctttttgcttgagtctaattgagtgaatgtaattgtagagctctgtggtcagtttgtttttctattaacttgatagttctttatcattttcttttgtcgataattaaatgtaggctttcccaaaagacactttgttcagattaaataacagagagttcttagttctttcctttatatgaatcctttgtatgagttgtacaaatcacagcatttgactgagttattgctatttaattgcctctgctttctcccattaccatgttttatttatttaaagattcatggcctcagtgactctgtaacttttaaatcttaatatttgacagcttatgcttgtgttaaagtacatgaaaattatatgaaaattgccacatattttataatatttgcaatattttgctctcactaaaactgtataggaatcattgagtcatatgactaaccaagggcttccctggtggttcagatgataaagaatctgcctgcaatgcaggagacccggtttcgatccctggatcgggaagatcccctggagaaggacatggctacccactccagcattcttgcctggtgaatcccatggacagaggagcctggtgggctatatagtccatgaggttgcagagtcatacatgactgagcaactaaacacacagacacacacatacacacggctaaccagactctttcatgaggcaaattaggagatcagagtagttttcagagacataaggattgtttgccttaactaatatgaagcagtaaacttattccaaaaggttacccatatgttttttactcactttgaaaataaactttcaataaaacacttttttgtttgtgaattttatcattacagaatacatttaaaaatttgagtgtgtgtggtcagatacataatttgagggaagaaattagataaatataatttttttaaagttagagattaaacctgatccagaataagcaattttctaatttgagactggaagattcaaaacacatttcacaaagttagtggagcctccactagtgccttttagaaatattaattgaccatgggataaaagttgttaaagacttgtaaaacttatagaagtagaatttatataaaatatttctctaaaggaaaacaaagtgaaggccctcttctgtgaacttactccagaaaacgacacagataaattagaaatctggaaaggaataaataaattggtcctttacttagaaaagtgaaacatcctgttaaacttgtggctatttagcctttctagtattcataagaaatgctatttcataaatctagatatcacaagcatagaggactgaagattaaacaggtagactattgtctaagtttgaaagtgaaagtgaagtcgctcagtcatttcctactctttgcgacaccatgggactgtagcccgccaggctcctctgtccatgggattctccaggcaagaatactggagtgtgttgccatctccttctctagggtatcttcccaacccagggattgaaccccagtttccccaacattgtaggcggaggctttaccatctgagccacttagttttttatttgcattgtttaatgtttatcaaagtcatgttatatttaagacagtgaccttgagaagataagagtatttttgaagacaggtaagtcttttatctcttttaactaatctctactcacatacaaaaagttcctaaagaactgtagtgtattaagtggaagacacagaattacttaaagaatggtatgtgataaatgccgtaaatacaaagcatgcgtgtattttaaacatataagtgaatagtgttcatcagaacaatcagggtttatttaattggaaaattaattctgtaggcattcctaggaggagagccagaatcttgataaaagtgtaaacagctgcagagaatgagaaggtatagtcaaagaatattaaataattgtgttaccataaatgttattttatttttattatcttgtactagataaatttcaaacaaacaggtatagagagttaatacagtagacatttatgcaccaacaaaccagatttaagcagtgttaacattttgctgtagttgtctaccctcccttgactcccttgaaggcagtcactgttctgatgttatcttttctttttttgtttttatacctttaatatcaatgtaggagtccataaatacatacagtgccatgttttaccttttaaaaatggatataaatgctaactttttagaggtatacttttgctttttttcactcaactgtatttactattgtggccatgtatctaagttgatatagatggcttcatcttattcaactgatgtatgctagctcatcgttttgtaagtcatgtcatttaccaagtttacttttatccataccttaaattgaattaggaaatttacactatgctattgatttgagaagtgtatgtgattaaatttgtttttgtgttttaaaatttttgtccaggaaatccttgcacgtggagttcttcttccattgataaatcaactcagtgatcctgattatattaatcaatatatcatatggatggtatgtactttctaaaatgcagctcttgtttttaaaacagttttttaaaaggtataaatatgatttggaggtcaggatgattaagcaataatttattaaagaaattaagtaaaaatatatctcaaggtaatcttttatattttcaatatttctgtttgcttctgtgttgaatgtactagccagatttcccttaaggaagtaggttgataagataatcttcacagtgttcctgctgtttctacttatttaaatttaaaaaaggatgttttcttatctgtgtgtatggatgataagtacttcttaaaactgctgtttgatttcaaattaatctgaactacttaagtaccatgcaatttaaattttatggtaaatagtagaggaaaacatggagggaaagaacgttagattgagaataagatctaagttctagatacgtttctgtaagttgcttagtatgtcaataagttagataactcatagttttctcattcatcagatgtatcaaagggttagtggttattaagtttgctagttctaattttttttctgattatgtatgcttttcctcagtaaattaatggttgaggaagtgtgtgtaaatgggctattgctgggaattactttggtggttacctaaatctttgattcctttttgtgaatctgaaatttctctcccacattgtcttcttttacctcagtctagcttttctaggaaggaagtatttgattgttctttgtttacaatcatatccattttcagacttgccttttttcattgttgttgctattacagtgtttgtctctcccatcagattatgggtcccctgtaggcagacattgtcttcctagccttgtgttcctagaatctttcatggagttcatagaacttaatttttcatttcctctgtcagcttatttagagtcctgctaggctgtacctaggactttaaaaatttgcatatccccataactgaaagaaaaaaaacctttggttaggaattctgctcctgaaatttatcctaaagtgctaataagcgagattataacaatccgatttaaaactactactggcagtcttgctaataatactaaaaaaagtgaacgcaatataagtgttcagcataaaggcacaattgcactcatttcacgtactagcaaggtaatgctcaaaatccttcaggccaggcttcaacagtacatgaactgagaacctccagatgtacgaggaggatttagaaaaggcagaggaaccagagatcaaattgccaacttccgttagatcatagaaaaagcaaggaaattctagaaagaaaaatctattgcttcattgactaagctaaagcctctgactgtggatcacaacaaactgtggaaagttcttcaagagttgggaataccagaccaccttacctgcctcctgagaaacctgtatgaagatcaagaagcaacagttagaaccgatcatggaacaatagactgtttcaaaattgggaaaggagtatatcaaggctatacattgtcaccttgcttatttaatgtacatgcaaagtacatcatgcaaaatgctgagctggatgcagctcaggctggaatctagattgcctgaagaaatatcagtaatctcagatacacagatgacaccacccttatggcagaaagtgaagaggaactgaggagtgttttgatgaaagtggaagaggagagtgaaaaagctggcttgaaactcagcatccaaaaaactaagatcatggcatccagtcccatcacttcacagcagatagatggggaaacaatggaaacagtgagagactttattttcttgggctccaaaatcactgtggacggtgactgcagccatgacactaaaagacacttgctccttggaagaaaagctgtgacaaacctagacagcatattaaaaagtagagatatcaatttgctaacaaaagtctgtctagtcaaagctgatttttccagtagtcatgtacagatgtgctaattggactttaaagaaagctgagagccaaataattgacgcttttgacctgtggtgttgaagaagactctttgagagtcccctggacagcaaggagatccaaccagtcaatcctaaaggaaatcagtcttgaatattcattagaaggactgatgctgaagctgaagctcccatactttggccacctgtgaagagctgactcactggaaaagaccccactgctgggaaagattgagggcaggaggataagggggtgacagaggatgagatggttggatggcgtcaccaactcagtgcacatgagttcgagcaaactctgggagatagtgatggacaggaaagcctgttgtgtgctacagtccatgaggtcgcagagtcggacaggactgagcaactgaacaacaaaatagaggaataatttaggaatattgatgcaataaatagtctttatactatgatgtctttataaatatgaaaagatgtgtttattttttatgtgaaaaggacaactaaaaatgatgtatgtatagatatctattcctttaaaaataaatatataagtaattatatatttatgaatgactctgattctgataagttgtatactgactgaaatgttaatagagaggtcagtcaattcagttgctgagtcctgtctgactctttgtgaccccatggactgcagcacaccagcttccctgtccattaccaacttgcagagcttgcccaaactcatgtacattgagttggtgatgccacccaaccatctcatcctttgttgtagagaggtaggatcctgaaaattttaagttttctcttttgtttattttactttactacaagtactggttatgtcataagtgattttttaagaagtagcataaaggtaaaaattttaaagcgtttaagtagtaaagtaaaagtaactatctttaaaaagatttttttttgtaatgcaaaaatgaatatcatatactaaccttaaaaaatcagtttacagtactgtataatcttacctatagcacagaacaggatgcaggtttactagaatattatggttatctcacactcatgggattaggaattatttttatttctatttttctttacttttcaatttttattttgctgcacttatattaaatatataattagttacatggtaaaaacatttttgagggacttagcacatactgagaacagaattcaagccaccagatttttacttgttctctgcatagttgggctggtactattattatgtatcatggttggggtctttttatttaaaacagtgattgatcactattgtgctttgctgtaaaatatcaaaaaatatatttaaaagagaaaaatatatcaataaaggatctttagcttgctttgttgtctggcttattctcttgacattattcatgtggaaaaccctttgcacataggtattacgaaattggctcagttcttactctttctgccaggtaaatttcatattaatgagacctaattgtatagtttatttgaaaggaaaagtttagagcagtgtagtagtcacatacatcctccaggtaaaatgttcatattacctaacagaagttttaagtttttaagtcatttctaaagatagtactggccaatttgcattatttatctcaaaatatatattttatatcttttggggacaaactagttaattgtaaactcttctctctgactatgaaatagtttacttaattggtttatattgttatctcctactagagcagattagtgaacagctgtttacttgtttcttaatgtattcttagaaaaatcaggtctttaataacttacttcttttattgttgaagtaaaatttacacaaagtgagagacatcgccaggtagttatctgaagttgtgttataattttgtacttctacttgcactgtttgagaatgtgaagaccaaatttggtctctccacgttctgatagatatttggcattttcattttgttatggttaatttgcacatccttgatgattaatgattttgaacgttttttcaggtgcttattgcccccccttcttttccccacagttctgaactttggcaatcaccagtacttggactcctgtttagaatggacaaccaagttggctaccttttcatagttccctttactgttttatttggcttaaatttattgacagtcatagtcattggatcctttacaacattctcaactacctttcttctctctctcagtttattatttgcttggtgaaaccacattctggttaaatccaacttaatgttctactccattcttaatcttaaatagcaagtggctggagaagaaggatgaaataacagttattcatgttgttacagtgattctgttaaatttatgtcagagaatgccactcttaatgtttaaaattctccagtaacttttcattccattcacagtgaaagccaaaccatttactaaaccctatcatgtttgcttttcctttagcactcatctgcctttctttggtttagctctagtcaccgtggatggcttccttgctggcatcggacattctgagtgtgctctttacttcacagtgtgctatatatctttctcactttgttaatagtctgtgacccaggagaatttaagtaccatgagtagagagattttcattttgtttgaggacagttatgcctggcccacggtaggtactcaagattctgttttcatttaagtgagtctccctcccatctgttttaaactttattttcagatccgtgattctaattgcaactatgaggcctttatgaacattattaaattgagtgacaatattggagagctcgaagcagtcagagataaagcagcagaagaattacagtatcttcgatctctagatacagctggtgatggtaagtaatttatttaagaataagaatgttttacttctttaacaattactgtatattcaaacaaaacttgaatttacctaaatgtcattttatgttattaatggttttcaccttaactgaatctgacttttattattgctaatatgttctgagaataaagcataatagttttctgaatgtgagactcttgttattgcagttatcgctaaagataatttgcatagtttaattttaattaaataatttataaaatttcgttatttattttttaaataattgctgtattcattggttattatgttaaattacagtaagtttatgtttaaagtatttcacaagtaacactgccactttacctcataatcaatttgtttatttttagatatcaacaccatcaaaaatcaaataaatagcttattatttgtgaagaaagtatgtgactcaagaatacaacggttgcattcaggcaaagtgagtaaaatactcttgaattaatatttaactatagataatttctcttcattaaaatatccagcaaatgacaaaaggttgagtattaaccagtgtggcattttacagaagaactaaaaatttagaaaaaaattatattatacaatgtagtgtatttattaaaacaagctaatgagattaaaatattacatgaaaagtaaatttctttatttatgtatttgtctactcatgtgttatttattcaaaattcaacatttattgaattttgtacatcggacaccattttagatggatccaacagatggaaatctctctcatgaagcttacattttagttgcagaatcagaaaataaaccaatacataaattgatatattatgtaaaaaatgtaaaagtaagtgaaacgtgaaaaaataaaatgtaaaaaaagaaaaaagacctaaaatgtgaaagaaaataagtaaagcaaagtagggtggtagagaatgtcacagtggtttagatagatgcagagatttggtaacatttgagcacagagagatctgaataatatgggagaatcctgtgaatttttttttaaatctttcatgcaaaggtgagagcaaatgtgaagtccctggaataggaaagtgcctggtgagttagaggaggtcattgtgactggtatgggaatgtatgataggatttgtagtaggaatgagattagagaggaaccttaggggttagagcatacatggttttgccttccatagtaagatgttttaaaatctgactgtgatagaaatccattggagattcgccctgccaagtgacataatctgacttatgaggtaaaatgattatttgggctctttgtgatgagtagattgtggtggagtggtggagacaagaatggaaactaacagatcgtttacacgactcttgtttttgtttaataagagatgtctgggggggttcatgtgagaagttaattagagacaatatttgctaatgtattaaatatgggttgagagagaaaaaagaactcaaggatgattccagagttttttggactgagcacctgcgtgaatagtgttgttattcactaaaatgaataaaactgagggaggaggaaatttggaagagagaatcaagttttgaatgttttatcttgagatccctgtttgatgttaaagtagacattctaattggtaaattcaagtgcgagggaaatttcgtgaatgaaacaaactttgagaatcctcaggattatcagctgcttgtttaaagttgagagattggatgagattacttaaaagaatgagtttaagaaagaagataccaaagactttgtcctgaggcccttcagttactagtgtttaagacaaagtcaaagatctagccaaacaaactgtaaatgactgttgagattgaaggaaaggagtgtgatatcctagaagcaaagtatagaaaatgctaaaaaaaagtgagagatcaggtgtatcacagactgctaataaatcgagtaagatgaagatttagaattgactgttgggtttgccacaggggtgttgttggtgatccacgagagcattttggtagaatagtggagaaaaaccctgatgggagtcagttataggtagctattgggatgagtttcattgtaaaagagagcagagatctggggctttgaaacaaattttttactaccttcagtttttggtgtagtcaccttttttatgctggttttctattggaaattgatttgtgactctttggtcttgtaattttgcagtgtacttacattccttaaggaacagaagacttatttttaaattttgagtttaatttgctagtttaattataacttacacattatttgaggcctatatttgtcataaatgtgtgtgcaggtgtatgtatgtccgtctttgttcagttaactatattttaaaatgaatttatatacacatgtaaattcagaatagaagaataatatggtttcacttgtgattgttgtttctttatctagttaccctacctagatcttgagagttagtgatgcttgtgtactgcgagctaaatagcttcagccgtgttcgactctttgcgagcctatggactgtagcctgttgggttcctccgtccttgggattctcaaggcaagaatactggactagatttccatgccctcctccaggggatcttccccaccgagggattgaaccctcctctcttaggtctgttgcactggcaggcagattccttactgctgagccacagggaagcccctggtgatccttaagcatcattatttaagtctgtttgcctaaatactttttgatactgaattccttttaaaatttagaaactttgtttggaagcttgtcaactctattttgaatatgaagctttaccttttttaatagctcaagtcatagcatgtattcctttggatgaaaattcagaatcttcagagatagagtttttttaaccatactgcttatcttaaagtcttcgagatgctttattctttttattacaaataaagtgatagtgaatactcttctccatcccatatctatagagatgctgctggatagaaccaagaagtgataaaatctgaggaagacttatatagggggaatcatatactggtactagattgctttgttgttcagtcgctcagtcgtgtccaactctgtgacctcatggactgcaacacaccaggtttccttgtccttcaccatctcctggagttcgctcaaacccacgtctgtcaagtcggtgattccatccagcatctcatcctctgttgtccccttcttctgccttccatgtttcccagcatcatggtcttttccaatgagttgactcttcccatcagatgaccaaaatattagaccttcagcttaaagaacagtctttctaatgaatatttaggatggactggtttgatctccttgcagtccaagggactctcaagagtcttttccagcaccacagtttgaaagcatcagttctttggcgctcagtcttctatatagtccaactttcactactggaaaaaccatagctttgactatgtggacctttgtggacaaggtgatgtctctgctttttaataggctgtgtagctttgtcatagcttttctttcaaaaaaattaaattcttttaatttcatggctgcagttaccttccacagtgattttggagcccaagaaaatagtctgtcagtttccattgttttcccttctacttgccatgaagtgatgggaccggatcttagttttcggaatgttgagttttaagccagttttttcactctcgtctttcaccttcatcaagaggctcgttaattctcttcactttctgccattagggtgatggcatctgcatgtctgagattactgatatttctccaggaaatcttgatttcagcttgagcttcatccagcctagcatttcgcatgatgtcatctgcatataagttaaataagcaagaaggcaatggcaccccactccagtactcttgcctggaaaatcccatggacagaggagcctggaaggctgcagtccatggggtcgctgagggtcggacatgactgagtgacttctctttcacttttcactttcatgcattggagaaggaaatggcaacccactccagtgttcttgcctggagaatccaagggacggggcagcctggtgggctgccgtgtatggggtcgcacagagttggacacgactgaagtgacttagcagcagtagcagtaaataagcaaggtgacagtgtacagccttgaaatactcctttcccaattttgaaccagtctgttgtcccatgactgattctcactgttacttatttactacatacaggtttttcaagaggcaggtaggtggtctggtattcccatcttttgaagaattttccagtttattgtgatccacatagtcagaggctttagcatagtcggtaaagcagatgtttttctggatttctcttgctttttcgatgatccaacggatgttggccatttgatccggttcctctgccttttctaaatccagcttgtacatctggaagttcttgcttcatatactgttgaagtccaccttgaaggattttgtgcattaccttgctagtatgtgaaatgagtgcaatttgcagtagattgctttaccccagtaatttcaaatcagtaatctgttgttgttcttacgtgcttatatgaagaggagacactaattacaagaaaagatttttcctcctcttttcaaatcatcggcttttcctttatatatcacctatgcctaatttagtatctgcccctaaataaggcagctgtatctaactttcagaaaatctgtgcatctttttttgaaaatagaggtttgtgagtatggatttgggaatgcagagaagctggtggaaatcatttccagaaacgttggtttttgtggaaagagcatcagactttgaggacgctgactcattctaaccagctttgcaatcataggcaacatttctgaccatcaactttcttatctgttgagtggaattggtgatgcttatccaataggattgctgtggagatttaatgaagtaatatgtgtgatgcacctagcgcagtgctggacctgtagattctctaaactttgaacctgttagaaacttttttctctgtatatgggtagtttccttgatttgaagtttatgtaatttacaatttaggtagactgaaaagaaacacattttctacaaagattatagactttttacccaattagcaaatctactagttaggaataattttatttttttctagtaggtagacttcaacctctccttgaaaatattgggatttgtttattcttcaacataaaagctcctttagtccctatcatgttcatttttttttggaatgggtaaaaatagagaatacatgaaaatacatttaggtttattttttattagaagaaatgagtgcgcattgtgcttttaatgtatatttagtaagcggctcttaaaataactctaagaaattcagtgagctgatactttttattggtaacccacctgtataagaagaaaaaactttattccattttaacttaattgactgtgaagaaagttgagcgccgaagaattgatgcttttgaactgtggtgttggagaagactcttgagagtcccttggactgcaaggagatccaaacagtccatcctaaaggagatcagtcctgggtgttatttggaaggaatgatgctgaagctgaaactccagtactttggccacctcatgtgaagagttgactcattggaaaagactctgatgctgggagggattgggggcaggaggagaaggggacgacagaggatgagatggctggatggcatcactgactcgatggacatgagtttgagtgaaccctgggaattggtgatggacagggaggcctggtgtgctgcgattcatggggtcgcaaagagtcggacaccgctgagcaactgaactgaactgactgaaggatctttaacgtagtgagtgaatagatgagatgttaatctgcaaaaacttttatttgtaggagataaatactgtgaaactggcagcaaactttgggaaactttgcacagtccccctggacagcattcttgtagacaatgttgcactacagttttttatgggtaggtaaatccattttataaaaataatataaccctcaagtttttttataattgtatatattgttaaattttaaatacttgatattaggcatgctagatatatctctctttcattcctcattttctgaaatatcccctattttttttagaaaccatagggatagagatttgtttggttttaaggaaataaatgtttattgcagttccaatgtgcatttgctaatctgcttttaaataaaccctaagagattctactatgaattttaattatttgaaaaagagactatcaggaaagcatggtatatataacctgcttgtatcatttttgggtattaatgggggaagggtcttatttttataccattttatatgtaaatgtttattgattttattcatgttacagaattgcttttatctaggggatgtttccagcaaaactccctgagtctttcatattcatgaacaaaaagaaatgcatggcttattaaagagcccaatccttatttttaatacatatgatataatagtaatatgattaataatttttattggaagctgaatgtggtggagtagtttatttctgatgaagccttccctggcagctttattcccaagaggtgttttcatgaaaaatcagatattttttaaaatgcacttccatttctgttttctgcataattggtctcttcagcttaaccaatttatgatatgacttttttttttaacctccagcattttctaaacatgttcaaaatgcaaagttttaagtatttgaaacttgcaaatattttctttcttaacttgtcttacagctgtatgcactcaaaaatctgtgactttaatatccctgttgttatgaattttgtttggtagactacatgcagcaaactggaggtcaggcacatctcttcttttggatgacagtggaaggataccgggttacagcccaacagcagctagaagttttatcaagtcgtcagaaagatggaaaacatcaaaccaaccaaaccaaaggtcttttaagagcagctgctgttggaatttatgaacagtatttatcagaaaaggtgaggatatactttgatttatttgaggatacattttgttttcttctttgacagtgtcattaataatggtagattattaataattaaaattaataatgatactgccaaagaagataataatgatttgtagtacttataaacatccattgttcatgctgctatgcacaaccgtcttacattgccttgttttatcctgaacatagtattttgtatattattctcattttataggtgaagaaattgattgaattagaaaattgaataaacctgtccagggtcatgtagatgctaaataacagagttaagattcagggtcacacaactttaaataataggaagtaagaggtaaaccttgaaaacagtaactaaaacagagctggagtggctatactaatattagataatagattttaagacaaaaaagttactagataaacaaggaacattttataataggtcagttgatcaggatgataagacaacaaagcccacacatacatgaagaacaaactggcagaattgagggagaaatgggcaattcaatagtaatagttggagacttcagtactccctctcagaaactgataaaacagttcgatagaaaacgatcaaggatgtacaagaattgaacaatactttagaccaattagaccaaatacatctgtagaatacttctcctaacaacagtgttattttcaagcatacacatagaacattctccaggatagatcatgctgctgctgctgcatgttgctcagtcgtgtctgactctgtgcgacccaatggacagcagcccaccaggctcctctgtacctgagattctctaggcaagaatactggagtgggttgccatttccttctccagtgcatgcatgcatgctaagtcgcttcagtcgtatctgactgtgtgaccccataaatggcagcccaccaggttcctctgtccacagatttctccaggtaagaatactggaatgggttgccattttcttctccaggatagatcataagttaggccataaaacaactctcattttagaggcattaaaattacatataagtatgtctgtttctcaaagtagaattaattagaaatcaagaacaaaagggatttgaggaaatttagaaatatttgaaaattaagcaacaaatttctaaataatgtctgtgtcaaaaatgtcagaaggaaattagaaaatattttcaattgaatgaaaatgaaaaaaattatacatcaaaatttatgggatgcagttaaagaaatgtgtaaaggcaaatgtgtagctttaaatgcctgattagaaagaaggatgttacatcagcaatatacattttcatcttaaaaatctagaaaaagaaaagcatgacaaatctaagcaaacagaaggaaggaagtagtaaagatcaaagtggaaatcagtgaaatagaaaacagacaatagtgaaaaatcagtagtacaatcaaaagttgtaaaatgaacaatgaaatttagaaaactttagctcagttggccaagaaaaaaagatacagatcaccagaatcatgaatgaaggagaaagcatcaccactgactatagaaattaaagggactacaaggaaatactgttgttgcttagtcgcaaagtcgtatccaactcttttactaccccatagactatagcctgctaggctcctctgtccatgggatttcccaggcaagaatactggaatgagttgtgatttccttctccaggggatcttcccaacccaggtatcaaaccctgtattgataggtggattcaccactgagccacctgggacgccctataaagaagtattacaaacaactttataacaacagattagacaatttagatgaattggacagatttctgggtatacactaattgtcagactgactcaagaagaaatagaaaatacagtaaatgaatttaattaataattaaaaatcatctttcaaagaaaagcctaaatggttttactagtgaattctatcatatatttcaagaggaaataataccagtatttcacaaactcttccagaaaatagagaaaaaagaaacactttactgttcattttatgaatttagtgttattctcatatcaaagacaaagacatcatttagaaaactacagactgatgtccctcatgaatatggacaataatcctcaagagtcacactccagtatttttaatgactatgctataataccttttaattcatacttattagcacagaattatattttaattttaagtatatatattatttggaaaccacgcatttgtgcacttgcttacatttttgcctgatgaaatatattgtatttaaaagagtacacagttttaagaataatagtacagcaaatgcctttatacactcaattcagctttagaagtagaacgtccattgtattttaaagggcttcccttgtggctcagctggtaaagaatccacctgcaatgctggacacctgggttcaatccctgggttgggaagattacttggaggctacctactccagtattcagacctggagaattccatggacagtatagtcagtgggtcacaaagggttggatatgactgagttacttatctgtattttaaaagatccctatgttagcctttgcctgtccctactttcttgctttctgatgaagctggttttctctaattgttcacttactttcccatacagttttcctgtacctgtatgttctaaataatactactgcttcagctttatgagattttgacattacaaaaatgtcaggagagataactttagacatttgccttccagatggctgtcattgttgccagcagtagaaaagatgccattgttggcagtaatcatattttttttagcatgggacaagaataatatccatctttcatttgaaaatatatcaagaatgtgtacggtgaaaagaattatagtaaacaaatttatatgatttttctctaaaactattgaatgatttttgaagggactaaaattaaccttgaaataaatgtacagaactgagtacatgtaggctatagcaagaactcatacaatgaagaaaataactcattttttgaaaataaagctattgagaactcagatatcaccagaaaggaacagccagcttaaacacagtttcctcactctctttaataaaactataatttctttggaatgctcctttattctcacacgtttaaatgatctatgtgttttggaaccattttccttgaaaaggagaggttgttaacttatgacatcctttatgctttgaagtacttaaaaaatgggcatttcgacatgggcagcctgtatgataaattcatatatgcagagaacctgattgacaaacacctggtctaccaaacctggagatacaaagttgatggacactttttgggggaaagctgggaacaaatccctgtaggtctaaaaacctgctgtttttagtgagtaaaatcccattattctttgcctaaatgattttattgaaaggatatttcacttgatgtcatgacattgcagtggtaagagaaataaatgtgataaaggctcaagatcagagctgaaagtcatagtgaattttattttatagttgattgtatttagttataccactgtataaagggttgtcctgaagactacaagcagatcagaaaagtattgtttaaaaaggcacacaaaaatacactacaagatcatagaataaaaggtaaatgtaattgtttattttttattaaatataaatgtatttattagtcctgttatgtctataatcttttaaaaagtcttagatatatatattttaagaataaacagtggtactgcctaccaattttaaatttaggtaaaaagtttaaaaaatgttaaaataagtttctgtatcagagaacataatattattaagtaaattgttttgttttctcagacatattttttgattagtcttattaattatcagttgccactgttaactagtcattttgtttaaataactacatttgtgtaatatggaagtaaacaatacagattaatagataattttggaaaaaacatgcagttttttgtatttttatgttaaagtagtatcatatgtgcaaatatgtcttctgtattactgtggttttttgaaaaagggacttggttagttatgcccaatgttagctctctgaaagtattgcttgccatacatattccaaggataaggcttaatccaattctgtgtacctgagattatagaaaaaattaagctagataaattgaaaatgttattttccaaatttgtctctatttcctagaaactaagtttagtgagcccagagggcacatgaaaggacagaaactcacttaaatcatgttcctctttgatctttgtcacatagttgaagctgttgagttcttctgttcttcagggttggggtgggggagggaacaccacacccatacacaaacaaataataggtaagtgtccttttcttcttcctccaaaaagcccctcacaagaaccaaaaaagtaccaccacactacctccctgagtttacttctaagagtgttgaattaacaaggggacattagaagttgtatagcccttatgctgcacattcataccctcctgtttacttacttaaaattttttttaaattttgttcaagaatggttgatacataatattgtgtttatttctgctgtatagccaagtgattcatttacacacatacacattcctttttcatatttttctccattatggtttttcacaaagtatcgagtgtggttccctgggctatacagtaggaccttgttgtctatcattgtatgtatactagtttgcatctgctaatcccaaacttccattccatctctcctgcatcctctctcccttggcagtctcaggtctgttctctgtgtttatgagtctgtttctcttttgtgaagtgaagtggctcgactctttgcaactctgtagcctaccaggctcttccgtccatgggattttccaggcaggattactggagtgggttgccatttccttctccaggggatcttcccgacccagggatcaaacccggatcccccgcattctaggcagacgcttcaccgtctgagccaccagggataagttcatttgtgtcatgttttacgtcgtgcgtataagtgatacggtaatttgtctctctctctcttacctacttcggttagtatgataatctctaggtctatccatattgctgcatatgacttgatttcattcctttttatggctgagaaatactccattgtatatgtaccacatcttctttatcctttcatctctcgttgaacattgaggttgtttctatgccttgggtattgtgaatagttctactttgaacataagagcgcatttacctttaaattacagttttgtctggatgtatgcccaggatacttacatactttttcttctcttcttgatttatctattctgttccatagatagtctaacagatagcatagcgaaattgcttaaacagtgcattcttttggtactgtctctaaaagttaccatcatttaatcactcatttattctccatagccttcagacttaaaaatacaaaagttaacatgctgaggaatgtctgtaatatctgtcacattatgcaccttgagatgaaagttattgaaacaaagtaacttttcagatttttttctgtcccttctcatgctgatactttgctgcagtattataaaactgaattaggataaagatagtctattttaagtgccattcaaaaggattgtttctagtgttaaatgataagtagcaacatggcatactcttttgacattttattaaatacacatctaagactactgagtgctcaacactgactcatggtgacagtatttcctatgtgctggacacataagtcttatgtaaatctcttttcatcctcacaataatcatatgtagtatttatctccattttacagattgaataagtgaagccttgtgagaggaaacttgctcagcaaaagttaagatttaaatccatgtttttctaacaagtctactgtgtagtacctcatggccagaaaaatgctagctctgatttcagcctttaaacatcaacgtgtcatttactacccaaggattttttggcagttacttttagtactatgattccattaaattatcctactttggcttcctgatgcgaagagccaactcagcagaaaagaccctgatgctgggaaagattgagggcaggaggagaagggagtgacagaggttgatatggttggatggcatcgctgactaaatggacatgactttgagcaaactcagggagatagtaaaggaaagggaagcttagcatgctgcagtccatggagttgcaaagagtcagacatgactgagtgactgaacaacaaattatttaattctccaactatgaaggcttaacttgtatttagaaatttcaaagattaatgatacttgtgtttttctgtttgtcaggcatctccgagagttactgttgatgattatttggtagcaaaattagcagatactttgaatcatgaagatccaacccctgaaatctttgatgacattcaaaggaaggtattatgtacaacatttatcattatatgttttttgaaaacaatgtgtatgtctatatgcatgtaatttgtctgtaaaaggttattgaaatgttatgaaagtacagtgtgataactaaaaaagatgcgttatggtaataatacttcacaaagtagccagtttttctttgcttatttactgtagaaatgcagaaaatccctatgctaaattatttactttgaatctggctgaagtgacagatacagattctagaatttatgaatagatgatgtataaataacagattcatttattttgatatgtgccttgagcctttatttggatttgtttcttagagaacactactttgtagaccattatatataactgctgtcatgtgacttgttttgcagtaggactctcttcagtgtaacttagatgctagaggggccagaaaaatatcactagttttgacatagtcttattactgacatcctataaataaggagcctataattcattacagtaatacctctgtctagcttttgttgaaatcttattagtggaaattagtacattatttgtattaatgatcgaatatcttgatttatttcaataaggtatatgaattgatgcttcgagatgaaagattttatccttccttcagacagaatccactttatgtgcgcatgttagctgagctggatatgttaaaagatcctagtttcagaggatcagatgacggtgatggaggtaagatggcacacattatacatttatcagtgtatatatgtatattcctgcatatattctgctttccaaaggaaatcctttcaaataccataaaattgttcttaaagctgaaatataaattgtaatatattttaaaatctatgaataaatgatgaagtttacttactatactaaattaaaatgttaaaatctgataaaaattagaacataactgttgagcctagaattcctttttttttaaatatattttttaattgaaggataattcctttacagaattttgttgttttctgtcacacatcaagaatcagctataggcacacccatgtcccctacctcccaaactgcctctcatctccttcctcatcccacccttctagattgttacagagcccctgtttatgagttttatagcaaattcccattggctgtcttattttacatatgatgttgtccatttccatgttactctctccatacatctcaccctctttcctcccctccccctgtatctataagtctgttctctctgtctgtttctccattgctgccctgaaaataaattgactggtaccatctttctagattccatatatattcgttagtatacgatatttatatttctctttctgacttacttcactctgtataagcagctctgggttcgtccacctcattagaactgactcaaatgcattcctttttatgactgagtaatattccattgtatatgtgtaccacaatgtttgtatcagttcatctgtcgatggacatctaaggttgcttccatgttctagctgttgtaaatagtgctgcactgaacgttgggttacatgtgtctttttcaattttggtttcctcaaggtgtatgcctagtaatgggattgctgggtcatatggtggttttattcctagttttttaaggcatctccttactgtcttccatagtggccgtgtcagtttacattcccaccagcaatgcaatgattcccttttctccacatcctctccaacatttattgtttgtagactttttgatgatggccattctgactgttgtgaggtgatatctcattgtagttttgatttgcatttctctaataatgagtgatgttgagcatcttttcatgtgtttgttagccatctgtatgtcttctttggagaaatgtctgtttagatcttttccccactttttgattgggttgtttgtttttctggtattgagttgtatgaactgcttgtatattttggaaattaattctttgtcagttgtttcctttgctattactttctcccactctgagggttgtcttttcaccttgtttgtagtttcctttgctgtgcaaaaaacttttaagtttaattaggtctcacttgtttacttttattttatttccattactctaggaagtgggtcatagaggatcttgctttcatttatgtcattgagtgttctgctacgttttcctctaaaagttttgtaccttctggtcttacatttaggtctttaatccattttgagtttatctttgtgtatggcattaggaagtgttctaatttcattcttttacacatagctgtccagttctctccgcaccacttattgaagaggttatctttgccccattgtatattcttgccttcttagtcaaaaataaggtacccatatgtgcatgggtttatctctgggctctctgtcatgttccattggtctatatttctgtctttgtgccagtaccatactgtcttaatgactgtagctttgtactatagactgaagtcaggaaggttgatccctccagctccattttctttctcaagactgctttggctatttagggtcttttgtgtttccatatgaattgtgaaattttttgttctaattctgtgaaaaatgttgttggtaatttgacaggaatctctttgaatctgtagattgcatttagtagtttagtcattttcataacatttattcttccaacccaggaacttggtatatctctccttctgtttaatgttgtctttgatttcttttatcattataattttccatatgcagttcttttgtctccttcagttcagttcagtccctcagttgtgtccgactctttgtgaccccatgaaccgcagtatgccaggcctccctgtcccatcaccaactctcggagtccacccaaacccatgtccattgagtcagtgatgccatccaaccatctcatcctctgtcgtccccttctcctcctgccgtcagtctttcccagcatcagggtcttttcaaatgagtcagctctctgcatcaggtggccaagtattggagtttcagcttcaacatcagtccctccagtgaacacccaggactgatttcttttaggatggactggttagatctccttgcagtccaagggactctcaagagtcttctccaacaccacagttcaaaagcatcaattctctgcgctcagctttctttatagtccaactctcacatccatacatgaccactggaaaaaccatagccttgactagacagacctttgtttgtaaagtaatgtctctgcttttgaatatgctatctaggttggtcataactttccttccaaggagtaagcgtcttttaatttcatggctgcagtcaccatctgcagtgattttggagcccagaaaaatagtcagccacggtttccactgtttccgcatctgtttgacatgaagtgatgggactggatgccatgattttagttttctgaatgttgagctttaagccaactttttcactctccactttcactttcatcaagaggctctttagttcttcttccctttctgccataagggtggtgtcatctgcatgtctgaggttattgatatttctcccggcaatcttgattcccgcttttgcttcctccagcccagcgtttctcatgatgtactctgcatataagttaaataagcagagtgacagtatacagccttgacatactccttttcctatttggaaccagtctgttgttccatgtccagttctaactggttgcttcctgacctgcatataggtttctcaagaggcaggtcaggtggtctggtattcccatctctttcagaattttccacagtttattgtgatccacacagttaaaggctttggcatagtcaataggtaggtttattcacagaaatttcattatttttgttgcagtggtaaatgggattgattccttaatttctttttctaatttttcattataattatatagaaatgcaaatgatttctatgtattgaccttgcatcccatgactttgctaaattcattgatagctctagtaattttctgatagtttcttttgggttttctatgtatagtatcatgtcatctgcaaatagtgagttttatttcttctttttccaatctggatttctttatttatttttcttattgccatacctaggactcctaaaactatgttgaataatagtggtaaaagaggacacacttgtcttgttcctgatcatagagggaatgctttcagtttttcaccattgagaataatgtttgctgcaggcttatcatatattgcctttactgtgttgaggtaggttccatctgtgcccattttttgaagcgtctttgtcagagatggatgctgaattttgtcaaaggatttttctgcatctgttgagatggtcatatggtttttatctttcagttttttaatatgatgtatcaattgattgattgatttatgtatattgaagaattgttgcatttatggagtaaacccaacttgatcatggtatatgagctttttaatgtgtggttgaattctctttgctagaattttgttgaggacttttgcatctgtgttcctcactgatattgacctgtaattttcttttttgtgtgttgtctttgcctcgttttggtatcagagtgattgtggccttgtagaatgagtttggaagtattccttcctctgaaggttttttgaagattttcagaaaaatagacattagctcttctctaaatgtttaatagaattcccctgtgaagccacctggccctgggcttttgttttttgggaaattttggatcacagttttgatttcattgtttctaataggcttgttcataatttctttttttttcctggttccgtcttgggaggtagaacttttctaagaatctgtccatttcctctaggttgtccattttattagccatatagttgctcataatatcctcatatgatcctttgtgttgtctgttgtcacctctactttttcatctctaattttgttgatttgatttttcttcctttttttcttgatgagtctggctgttgggttgtcagttttatcttctcaaagaactagcttttagttttattaatctttgctattgtttccttcacttcttttttatttgtttctcctctgatgtttatgatttctttccttcaactgactttgggattttttgttctttttccagctgctctggacatagacttaggttgtctatttgatgcttttcttgtttcttgaggtagaatttattgctataaacttccctccttagaactgcttttgctgaatcccataggttttgggttgtcatgttttcgttgtcatttgtttttaagaatctttaagaaatcttaattgttaagaattttttctccagtaacctctttgttatttagtaacatattatttaatctccatgagtttgtgttttttgcagtttcttttttcctatagttcatatctagtctcatgacattgtggtcagagaagatacttgatacaatttcagttttcttaaatttactgaggtttaatttgtgacccaaggtgtggtctgtcctgaagaatattccatgtgcccttaagaagaaagtgtatttttctacatttggtggaatgtcctttgaagatatcagtgaggtccatttggtctaatgtttcgttgaaggtttgtgtttccttactgattctctgttttgatgatctgtccatcagtgtcagtgcggtgttaaagtccactactattactgtattactgttgatttcccgtcttactcctgttagtgttttccttatatatatattgaggtgctcctatgttgggtgcataaatatttacaattttatgtcttcttcttggattaatccattgaacattgtgttgtgtctttccttatcttttatagtattctttattttaaagtctgttttgtctgaaatgaggattgcctctctggctttctttaggtttccatttgcatggactatctttttccatccttttactctcagtctatgttactgtaggtctgaagtgggtctcttgtatgcagcatatatgtgggtcttgtttttgtatccatttagtcagtctgtatcttttggttggtgcattttatctgtttacatttaaagtaattatatacgttcctgttggcattttcttaattgttttgggtttgtttttgtaggtctttcttttctcttgtgtttactgcgtatgtaagtccatttactatttgttgtaaggctggtttggtggtgccaaattctcttaacatttacttgtctgtgaagcttttgatttctccaattttgaatgagatctttgctgggtaaagtaatcttggttataggtttttttttctttcagtactttaaatatatcctgtcattcccttctggcctgcagagtttctgctgaaagatctgctattaagcatatgggttttcccttgctgcttttaatattctttctttgtatttaatctgtgttagctttattaatatgtgtttcgatgtgtttctccttgggtttgtcctgtaagggactctgtgcttcttgaacctgattgactgtttcctttcccatgttggggaagttttcagctataatttcttcagaaattatctcagtgcctttgttttttcttactcctctgggattccctgtaactccagtgttggtgtgtttaatattgtcccaaaggtctctgaggctgtcctcaatttttttcattctttttcctttattctgctcttcagtagttattttcaccgttctctttcagctcacttatccattcttctgcctcagttattctgctattggttccttctaaagtatttttagtttctgtaattgtgttatttatacctgtttggttattctttatttcttctgtgtccttggtgattgtattaactgtgttaattacttcttggatcttttccattctatttgaaagtctttggagtatctttactgtcattattctgaattctctttcaggtagattgcttatttcatttttgtttatttggtcctgtgactttctgtcttgttctttcatttgtgctgtatttctctgtcttgtcttttctttttttcttttttctaacttgttccactttcccaggcttgagggttatattccttcttcggtttggttttggccgttggagggagaggttgttggtctgagtggcttgcattgacttcttattaggggtgattagtgtctgtgttctagtgggaggagatcaggcaggtaggtaattacagaaataatggggcatgtacattcacttccacacatacagtcgtaatgaaagcattctaaagaaaagagtgcaggagatagacttggtgaacaagggaaaccaaatgtgatattgatcaattaaaagcagagctaactaatgttcaatctggaaaactgagcctaagcagattgccaactgaggaatatagcaaagagagcacaagaatttaacttacatagtgaagaaagaaagagtaaaggaaaaaagggaaaataaaagaaaagcagagggagagaaaagagaattttcctttaaattcttgaagcatgttttcaaagggattgtcaccccaatatttttatgatagtttcttttttgcttgtaagtaataattgtcatgattaatgataggatcattgagaagattaaatgagataagaagtgatgattgaatgtcccataaactataaaacattataaaaacatttttttctgtttttaattctactctgttccaaatcctgtataagacagaagaagctacaagagtcgtttattccaatctttcagttttcttctgttcacattgtatagtgaagaaaacagactttaagagtgataacactttgattttactccttttctactacttattacctatgtgatgttggccaaacacttaatttctttaggtctcatttaatattctcagttataaatgtagactaatattcttatagtaatatcctacctcaaagttgtcatattttaatggaattctgtatgtaaaaatgatacataaactaaaacacaaatatcggtttttcttcatagtaaataactggctgcttaagaacaatgcgagaggcaacccttagacagtttgcagactctgggcctgatgacctgttttactagtgattcagtgcagaattacttattaaactctaatgaaatatctaggatttgataaactttctagcaaataagcaatgtaaatacaaagtaaatgggaaagactttactaagtatttaagagagtgctttaattttgctcatttacttataaaatagagttaatggacaggaccacttaaagttggagatataatagatgtattaagtggttagcactgctttagcaaatgcctctgttttggaagctctctagcctcccctcttttctacccatcctccccactccttattctatattagtgagactttactttttaaataatataagaaatatagttataaaaatttgtatgttacagtagcttttatattgattgttgatccagtatcttggttatttgtaaaactggaatattattctgttaactgtatttgattgcttaatggagggggttttctgtttttaagaacacttctctgggagctcagtagtaaaatgcagtgtacttcgagtttattatatattttatctatttactatctctgttgaaaaatcttttacagagctgatatgaaatttgtagtagaaactctccttccttaaaggactatcccattgtatattttagttttgtctactttagaaatttgctcagtgttgtaaaatggaattgctatctgacccagaaagaaagaagataaattgaatcataagcagctaatttataatcatctatgtattatataatgatcatagtagcaatatattctgtgggagtggtttttatcctgtagtataaaaactcttctggaatcttctaaactgacttttagcttccatttatatttgtcttgtatatgactgatggaagcaaattatttatgtgatctccaacttcccaaaatgtcatacttacttaaaacacaaagtagattgagactttttttttctgtagctgattttgatctgaatcaaatggactctttaatgtcagtcattgagtagtccctcacattggaatcatcttgatagtagtttggaattaatatatacacatacatcttttgtccgtctgggacattgctttttaacattccatgtcctaattaatgagctcttacatattttataactgagaaattgcctaatacttttttgaaaccatgttaagtatatggaatcatggatataatttgaaacatttttattaaaaatggggttatgtgtatttgtcagtgtttaggttttaggcatttgctacaagtgcttataattttcttgtttgtataggattgtttaattaaaatagacattatattttctggttataaattcattttctgacttttaaaaattaagcttcctgatactttgtgtattttttaaagtcctgaaattccggctgctttttagacattttgaaataatgatcagatctagtgttcaatgtgtgctgcaccccgcccccactttttctttatgtaggttaattgaacacagagttagtgggtaaagtcttaccatgtataatagtatcctgcggtagtttttctttgttttagaagaaatttcattcctgtttaattaaatttcattcttatttaactaaacttctgtaggtaggtaggtagctggatggcttgcttatccatgctctctctcttccctcttccttgtctttgtcctgagattgccttctttagttagtttagctctaagtaattttcagggtagatgttttttcctttattaaaacaaattcacagacttataaatatttaaattatgctttcccttttaaatgttaatttcaatcacatttttcctcatcatgtgaaacaatggcttcttttgttttctaatatctttaagcagttgtaaaggtcttgattaaatatagatctccattggctatagacagtctaaatttctgaatctcattgttaagcaagaaactaaaccatgccttgttttgctccgttgttcttgtttggttggtaagttttgacttttttgcaactacatgggctgtatcccattaggctcctctgtccatgggatttcccaaacaagaatactggagtgggttgccatttccttctccagggaatcttcccagtccagggatcaaacccatgtctcctgcatttccaggtgggttcttgaccactgagccaccagggaagcccctgttttgctcctagattttcttttaatttgacatgtctttggtgggaagacttaagaagtgggcagaccaaagaaggtaagaggcatataattgaataaggaggatagagaactattttttttatccattttaattatcctaggtggaatttcctatttttgtgttcagaggtttgaggaactgagaaatgttcttggacagttagaggtgttgaagttggaaggcaacgccagctgcctctggcaatagtaatagaaatttcctttgaagacacatctcgagatccaaactataaataatatctgagctaaagcctttgactgtgtgtatcacaataaactgtggaaaattctgaaagagatgggaataccagaccacctgacctgcctcttgagaaacctatatgcaggtcagcaagcaacacttagaactggacatggaacaactgactggttccaaataggaaaaggagtacgtcaaggctgtatactgtcactctgcttatttaacttacatgcagagtacatcatgagaaaccatggactggaagaaacacaagctggaatcaagattgccaggagaaatatcaataacctcagatatgcagatgacaccacccttatggcagaaagtgaagaggaactaaaaagcctcttgatgaaagtgaaagaggagagtgaaaaagttggcttaaagctcaacattcagaaaacgaagatcatggcatctggtcccatcacttcacggcaaatagatggggaaacagtggaaataatgtcagactttatttggcgggggggggctccaaaatcactgcagatggtgactgcagccatgaaattaaaagtcgcttactccttggaaggaaagttatgaccaacctagatagcatattcaaaagcagagacattactttgccgactaaggtccgtctagtcaaggctatggtttttcctgtggtcatgtatggatgtgagagttggactgtgaagaaagctgagtgccgaagaattgatgcttttgaactgtggtgttggagaagatcttgagagtcccttggactgcgaggagatccaaccagtccattctgaaggagatgagccctgggatttctttggaaggaatgatgctcaagctgaaactccagtactttggccacctcatgcaaagagttgactcattggaaaagactctgatgctgggagggtttgggggcaggaggagaaggggacgacagaggatgagatggctggatggcatcactgactcaatggatgtgggtctgagtgaactcagggaatggtgatggacagggaggcctggcgtgctgtgattcatgggtcgcaaagagtcagacacgactgagcgattgaactgaactaaactgatatgctacacgccatatagtaactaaactgtttatgaatattgctttgctgtatattcctttgtgttttaacagagtgatatcttacttggtaacttaatttgatcagatatatactctatatctttatactatatttcctttttccgaggaaaaagatattttaataattactctctaacattaattttaaaaaataatttctagttgatttttaattaaatgacattactcatggaattttatgtgtcttttcttctactaattgtatattgatttaagaatctagacttcagcatttttgatgcagatcaaccgtgaataagtgaactttataggtttaataaacaactttttatctttcatattaaagaataattttgtttgtaatattaatccagtgagacagaagtaacaaaatgcctctgacatttcctggtgtgaaatgtcattcatttcaaatgacaatttcaaatgtcatcctgaagtgtttacctcatgtttatatttatattagacaacttaatatgatactatgagaataaaatatataaaatgcttttttttggtacataaatgccttttgctgggggggggagacaacttaggtacaaagctgttttcactgaaacaacctggcttagaaaaccatgaacacaggtgtttgggaggagcgtaccacagttttcttcattgttctctcttggcttctgtggctttcattcttaggcttgaaccttagatagctaaagcactgttcgaagagtttttgactgtatactaagttgaattttccttctcacagaatcttttaatgggtctcctacaggaagcataaatttggtaagtactgttatgactactttaattcttaaagtggcctgaaaataatatgaaaaactgagccttaacatatgtaaataaatgatacattagaaccctcaaatcatcctttataagaagctgttgcacttctatagaaatattaaattcacatataagggatctgtggattagaacttaatgaaatgaagtttattttctttttaaaaatgggtttaaatcacctgcctgatttagttgcaagtgataataatgatttcattattttcaacctcagtatttaatatttcactctgatcagtgctatgatgggcagtaaatttatgacacataaatgtttacgttagaattagttttttcttcttgtaattagaaaagaaatataaaactggttgggatgcctgaaaacctaaagatatttcttaaggtccatactaacaagttcaggatattgaaaaaaaaaaagttttttttaagcttagaggattttacaagaattaagcaactgtattccatgattacaggtttaagaatgacacatttttagcgtataaacttcactggcatttcatatattcaaggtgaaatgtgaaataatgaacacttcagttctcttatatatccatgcttaccattgaataccttgttttcataaaatgctactagggatgtgctttagtgttgtgtgcaagtttctgtccagaatttgttgaggatggggagagattgtttgctttgttttccattctactacctacatgactttttcttttgaactttttgcaatagataagtagttgagaggtccattgtcttatgttccttagtatgacatttatttctaaaatgaccttattgtataaatgttccattattgtacaacgtatgctgctgctgctgctaagttgctttagtcgtgtctgactctgtgccaccccataggtggcagcccactaggctcctctgccgctgggattctccagtcaagaatactggagtgggttgccatttccttctctagtgcatgaaagtgaaaagtgaaagtgaaggtacaacgtataacctttaacaaaacactaaagcaaatcagccatagtgttatgtcagatattttgtaacattttaagtattttcctaaattctctggtatcgttatcgtttgcttctaatattccatagagttatgacaaaaaggaatagcttctggagactgaacagtgttagcaatataatgcccattaggaagaaaaagtttccaaatatgatgaaacttttccttgcattgaaattttttagtattcatgtttttagttcttgtaagtgtttgaacactattaaaaaatatttttttcttcattccctatctggcataaatactttttcaaataaaagagattccttttatcatatagtgatataaagcataacagtctgtgaattaaaaaaggtgacacttgacatcagtgacttacagtttttgttttcacacaaatctgttaaatccaagcttttaagtagctggaatcttttggattctttttttaaatacatagataaatttgaataaacagttgcattttaaaaatagtttgattacaaaaaattgttcttaagactgtttttcatatttaatgaagataatatttattaattgtataaaaattataaactgatcattatagtttattccagcaaactaagcaaagaaaatatttaatgtggtggtttactcattttttgattgagattagcacacagattataagcattttcgaagtgccattgtagttccgtttgctgaattgattatcatagtaaatttcaatttttggtttttatcctagcataatgttacagaaaacacttctttttttggcaagaagttcaagaatcttaacccatagtcactttgcaaactgtgttttatttcaggagaacattagtgcacttgttttgaaatcacagttttctttgattaatcagttcttatacttctaaatcacagtgtggttccatggttataatgtcatcagttgtaactttatatagtctggttgatatttacacatgcgtgataactgtgactaatggttaagagacatttcattgaattttttccatcatacttaatgcaaatattaattgcatattttacatgtgctagaaaagacatttatatacagaatttttcaacagcttctggcttgcatagtataagatgctaatatggttaaagtaataagaaaacagcatataactttttatatgtttacctacaaaggaaggttaccagtaaataatgcttttttgaaaaaagtgattgttttatattccctgtgctagcttatagttagaagaagattacagtagataacaattttaaattttgtagaatattccatttcctttggggttctatctttcatgtgaaaataattctaaaacaaaggttctgctgtttgtcaaaatgttttgttgtagattagtttaaaaattaaatgcattttaattcttttcaaagtattttcattcacattatattctggtagagttgtagaacagatattacaccattaccattgggaaaactgaaatacaagaaagccttactgatatggctaaagtctattaaggttatcagtggcgaagtctggactagatctaatttaattgaatagttttcccactcgacttgtggatcatctgtatggagttaccaaattttgtttcttctgatgatcagtctttagtagatagaattttggctttcttcttaggatgcaattgcttgattttaaatggctttatgtcatatgcatgattgcattgtcatttagatgactcgttaataactggtaataccacattaggaatccaaagttcattcagatcccatggtttttcaagtgtaaaatatatctgaatcatatagtctgtgtgtttataggtctctaagaccactcctgtgttcactgatttactaagaggactcacagaccccagcatagatgtactcacagctaaaatttattacagcggaaggatataaagcagaatcagcaaagggaaaaggtggatggggcaaagtccagaaaaaactgggctcaagtttccacaaatcttctcccatggaagtcacatagcacagacttaactgcgctggcagtgaatatgacagcatgtgtgaaatgctgctaccaggaaagctcatctgagactcaagtgcccagggtttttattggaggtagatcacacaaggcgccatttgtctagcatatactgaactgactcccagaaggaaagcgggtatttggtataaaccacgttgtctgtacagatagtttaggtagagtaagccactttagcagttaggaatgatgggaactttttctaaatctaacttccaagatattgtcctagggcatcctttctaaggagagcaacttaaggtctgttgtgttaactcttttccatacagtctcgccttcattatatgcttatgttcccttctgtgtaagtgtgggtgtgtggacaaggagcaaaaatgttttgagcccaagtctatagttataaaatttattttgaatcaatcagtaataatttttgtttatggaattatttttaaaaaaataactaaagcttaagtgtagattcacttcatttagtaagtaatcataatattagctaacactttttgtgttaggcagtcttctaaacgttttacatgtcttcatttagtcctcacataccctttaatgtaggtacaattacgataaggagtcttaactaaaattatttctaagttaacaaaagtgttaatacacggttggctctaatatatttcaacattaaaaaagtgaaatgttgatttaagaacatgtctacttggggagggaagtggaaggggggttcaggatagggaacacatgtaacccatggcagattcatgtctgtgtatggcaaaaccaatacaatattgtaaagtaaaaaatgataataaaaaaagaacatgtctacttatttttatccacattttttcttgccatatagtgaatataattgagaagaagcaaattatagtatgtggacaggtaatgaagggagaaataatctgatgtatttattaagttgattattaaattactttgttttatggtttaatcttatcttctctttctcctactagtataaacaaagagaattattgtttgtgagagggaggtacagataaggacatagagcaaaaatgaataatgtatatgatatagaaatctttaatactttctttcctatagaatttaaaaattttgttttctaatttttttcccctcatcagtctttagatgacctttcaaatgtatcttctgatgactcagtacaacttcatgcttacatttcagacactggtaagagactttgtggtttaattattacttaaaaactattgagtatcattacccctaccttatcttccacatttattttaacaaatcgtttttctgttctttagccatattttcatgttacttctttttctggaacatattcttcattaaattctataatgtttattattacatgtgtatttcctttctttaaggttgttactgttatcatttgaaaaaggataaattctgagcactttgtcattgctggtaaactttgaaaccaatcttttctttgagtctagctgataattgtctgcataattcttattgaattgttttggggcagattttagtttgctatttgttttcatacatgcagaagtcagtagatttctgggtaaatgaagcttttgtataggagaacaagaaatgaaaacaagaaatgcttggattaggtgagattcatgactgaattagcatgtgtgcaaaatggctagtgaattgaggaaaaaaataatttcatcattgttactgaattattagataatgtcagtgatggttttcttatctggcttctcatgattcttatgtggatctctcttttctgaggattctgatattctagctgttttgaccattcattcaacaagtgtttatcagcttcttaaagaatatggaagcataatactaagcatttttaataagttattatttctgtcagacaaaattatgtataatcactaaagaggcagtacactagagtggttaagagcaccactttttatctagattgcttgggtttaaaccccagctttgccacttaatggttgggtgaacttggatgagtcttaaattctctgtatcttaattcctcatctgtgaaatgggataatagtaatacttgcctcatagaactaataaactaattgtattagtagttacatggtgggcattatatattagtgtttgttcagtaaccatttactagttgggctccagagtctctttgagtctggagcccatgtccttaaccttatgacaggaagtagagctagtgcagtgcacttatggaatgattcttggactagtggactggaccttcattgaggaatcttgttttaaaaaatattggctgggttagacatacgcttagtgatgagatttatttatattccggccctagttccttgtctggttatagattagtaacaaagaggttgcacagcacctgctctgagtagtaacattgtcctaatgaaaacacaacctcttatttccactgtaatatctcaccatcatcttaaaatgtatgtagcctcattatcttttaaaatcaaattacctttgtatcttagggcttgttttataatagccccatattcttccttttgtgcacccatcgtagtctgatctccctgcctatcaagtttgtaacaaatctgattattatttttttaaatgctttctgaaattcctttcttctttccttttctatttcttactagtttccttgtttttattaactcctagttggttatggtttgctgtctaagtggcccctgatttctattttcctttcccaaacctttcttgaacacagcatgtaaagccattaccttgttggcacgctgacactgttgagtgatggtggttttttaatgtgatgaaagtgttgtacagtttgttctgcataggtctccaagtgaaagataattgaaagaggtgaacagtgaataataaagtctctgacagcaagatgacccaggtctgtccccagtcttcagttcagttcagtcgctcagtcatgtctgactctgcaaccccgtgaattgcagcatgccaggcctccctgtccgtcaccaactcccagagtccacccaaacccatgtccattgagtaggtgatagcatccaaccatcttgtcctctttcatccccttcttctcctgccctcaatctttcccggtatcagggtcttttcaaatgagcccactcttcacatcaggtggccaaagtattggagtttcagcttcaacatcagtcccatcttatattttgtcaaatcaggaacactgatattagatggaaaggaaatgaaggacaattctaaatacaaagtgcaaattttagaaaaactttcatgaaaacctgggagagatttctgtagaactgcatttgccagtatagatttgtagctattttgtgattaatttactaagaagctgctcagacctttctttgcctaagtatgtacaaaatacaaaatatttagtcagctccaaagcttggccacttgttttttttacaagagcaatttatacttctggtcaacatgatagtctaaactgctatgcaaaatcgtgcttcctacacatagaaaaactgaaaacagtagaataaaaatacctaaaaggggaaatctacaggtggaatagactatgaggaaaagcaaatatagggagatgaagaggagttgaagccaaagagcttataggaatgtaaagactgctcttttgattttgatagcatttctttgtcctcaaatttaaagaggcacaaatgggctaaggcagaggaaagcctggaaccacaggcctttgcataaagcccacattcacagagggtgacttgatatgaaagaggaactagaagaacttagcctactgtcagaggaaagaacaaagaatgtcaaggtcatggttgggaatggtatcactcatatgaaattgaaaggctgtgttatatcacatgtgggtgatgtaagattcagccatcctcaaggagttttgtaccacaaggagtatgataaaaataatcgtagagataaaataaggcaagaataccacactgtaaaaaagaaccacatccagttatagaaataaaaaaatagttattgaaattaaggtgagtgaatgaattaaaaagcagaccaggtaaagatgagtggagacttagtaaactgttggagacctgaaaaggtgatcttgagtagaatacaacatggctttgaggtgggaaaatggaaaatgagaaagaattattcgaagtacatctctttacttaatatctgtacaaaataggaagaggttttgatttttaagactgcctgacttggatggtttctgtcaattcagtagaaaaaaatgacttcttagaaaagtcttcagaataaattacacttgtaaattgctgtatattttgaatgagaaagacttgccaaaagatcagatagatcttgttgtttgtggtggttttagtcactcagtcttgtcattggctatagcccgccaggctcctctgtccctgggattctccaggcaagaattctggagtgggttgccatttcctcctccagggcatcttcccaacccagggatcaaacctgcatcccttcatcggcaggtggattctttaccacagagccacctgggaagtccagatagaccttaccctgtagcttttgcttgtagttcagtttcagagctatcaatattaattgggctacagctgaacagtgaaggctaacacagaagatattgttttgtttctgttaaaagctctttggaaagagaatccaaagtggacatcactgtgtagttggtagtatcttgatagccttgtaggtcgttttgtaatgtaaccaacacgtataacatcttatggctgtgagtacagatgacaggagtctattttatcctggtgacatccttttgtcttatctgtcatttcaaattctccatttcatgttgtcctttttgtttttgttcttcatcttcctcctttttgtgtcttttgttcctcttcattttgtcttaaatgactagtatatgctcactatgacccatatgctgtggcaggcgtttgtaatgatcacggcaagacatacgcattgtatgccatcactgtacaccggcgcaatgtgaacactgaggagatgtggaaaacctaccgtcgctacagtgacttccacgacttccacatgaggatcaccgaacaggtagtgagatttttaaagtttgtgtactttatattgttccatgattccatgtttgattctaaatgattgtgagtaatggtaaggtatgaccaaagctaagaaaataaggtaacaattttttataatcaacagtgaatactagaatgtttttgtccatttaactaataaattttaaacagtcctaatcattgtggactagtgacaaagtaccaatgatataccttggaaaattagaataaatgtgtatgtctgattttaagagagtgtgtgtatcttgtcctttgcttaggtatttgggttatttaacatatagatagagattattgtaagacattttgtgattttctgtttggtaatataatttaaagctgtggttatttaaaatagcatcctttcccaactactaacaggtaaatcctccactaagttgtatgaagaaccgaaacctaaattatatttaaaattaaccaaataatgattttaattcttaccaaatacagctgtcttgtttcatagaagtatgaggactcttaaacataacaaatgtaaatatttttatttttctctgttttatcttttattaaatattttttcttctttttaacttagaacaaaataaattatcagtggataaattggaataggtaatctgaaatttattttaagtcatgataatctttcatgcaatgttttaaaatatataattattggtaagccaataaaataataataatgatgacatttgattgggtgaactaaagctttgaaatgacgttttactacataagtaatcagaaaatatacctttcacttaggatgtagaaaatgtatggttggcaccataattatctcattaaaatattttgtaaatagagtgagataacctactaataaagctttaaagtgtttagaaaccaagttattattgactccacaagcccatattaaaaggactgtttttaattatattcataaggaaattaataactctgggcatatctcttctattgttcttgttaaatagatctccatgtttggcttgatttgtttgcaaaggtgaaataatttctgccccccaaaattcctgtttgatatttttttttaaatcacatagttcatacatatcttccttttcatcctcacactttaacctaacaagacaaattttgaagtaatgtgaattactgagagtagttttagttacttgcaaatttatgggaatttggtataatatgaaattttctttgtgtgaatagttgtaattttttcctactgttcagaggaataatcattgcttaaagattctaggctgactgtaaatactgtgtttatagattgacaaatatagataaagaacatactttaaaaaaactctattaatagaacaattcatgtagaaaatttacttttcagtacagcaccaaaatcaaatgcaactaactgataaagcacaattcagttttaaagtgctcagtgcaggcaaatgaagtggatgtgttaaagttacagtagtatgtgattactaaaacatatggattgtttttggagcttaagaaattaaaacctaagcttgttaagtgaaattttaggtttaaggaaagtactaagcacttgtaaataagactcatactgtttgccttttagttctgccttatttatatttttagttttattttatatttatatttttaaaacaaatcctataagaaaatgcagtgaacttttagttcactggtggcaacagtataaccagtggatgcaaataaattttaactccatagagctctctaagtattaaaattattttagaacaaatttcattttgtttctttaactttgtgacataaatttttttcccattctaaacatttgaactattatttgttttctttaatgttttatagttttatggtcttaatttgatactttatggataaagatttataggattaaaagaaaataattgaggaatgggatgaagagggaggtgggaggggggttcaggatgaaatgtttttttcctttttaaatttaagggaaaaaaaagaaaataattaaaatgttgaatgtccaaattattttagaaatgatctcacctctaccagttcattattcagcttatgaccatgaacaggacagaccgagtccttgcttctaagagcttgtgttccagtggataactctgtgcctttcagttttattggatgcttattcctaaatatgcagcttatgtttataaataaaataccaatgatttaaaaatattaagtatgcattaagataactgagtaaaatgtatttatatgtttggatataaatgaactttgaatccttctaataaaaaattctgaatgtttttcaaattttctagacctgacatattcagtgtggaaagataaaatctttgggtttggaatgtctgtgatttatgtatagtatttgagttctttttgaacattgaaatatattttaatttatattagttctttaggtaggtttcttttttttcattcatttaaaaatatttttgtgactttttggcagaggaaatcctattactttgcagggaatggactactttgtacttgtaaataatcttttaaatgtcaaactaataatgaattaatatagagtattaaatttttccatttttcttccttttaaaataacaatatttgagaaaaactgttagacataatgcttctggtacagacagataattttaaaaccagcttgataatttagactttaagaaaataactgttacatttaaatttttattaataaggtttaatgtttcaaaattttggaaattgttgttttgaggagtactgctatattcccttggtatgttagtttactagaactgctataacaaaatacccagcttaaacaacaagaaatctgttttcttatagttttggaagctggaagtccaagatcaagttgttggcaagtttgatttctcttgagtcagctctccttggctttcagatggtgctgaatatggcctcacatgactttttcattgtatgctgccattcctgatggctctttgaatccctcttataggggctttgttttgattttattccctctctgaaggccttgtctccaaatacagccacttctgaagtactggaggttaaggtttcaacatgtgaattatgagggaataaaatatattggtaatgcctaaataaaccatgcattctgtaaaattcaatcagtagtttaagataccattgaaaagtcatattccaggaaactaaatatcttttagaacaccttgaaaaatgtaaatttacttctataaaatgtggtttaaaaaaattaaaaccaggatattatacattcatattcaataaaaacccattcttatacttctatgaaccaccaaatttgtgactacagcataacattttccctgaaaattactgcccccactttttttttttcccttggctagagtaaaagaactactttcaacttacatgcataacatgtgatgaacttgtcacattatagctccaagcaaccatctgatttgtcattccacttaataatttatcagaatcttccagtttggggatgaagattatcctacaccttttcatttcctcttttctttaatctctgcaccaagaatgagttttctctacacactcattgtttgttgttatttaatcaaagaatggttttagaaagcttgttgcttcctggatatgtattgcacaggaaaagcaatgaagctcctcattgaagttttagatactagatattgttggccacgcacaataacttgctgaatgacgttgttcttccactttgttagcagctagtatggttaaaatctgtgctttaacaaggcatggtggattgctaactatctggacttctgaaggtgaagtctatagatggctaaacttcagatatgtacaattgtttttgttagtggctttacaaatattagatatatgctatatagctcttttattttcttagttattatgaatttatttttcatgtagtttcgtatagggggaaagtatctgttatactatatgtcattatatagacagagttatagctgtaatctatattttgaagtttgcctcttctacttttaatagttagctattacagtgattaactgatttgaaatcatcaatataaaaatatttccttgagttttttcaagaaaccagaaactcataactttgattattaatagtttatttgctaatactttattcttgtcaaaaggtttttaaacaaaatgttttttaaaaccttttgttatgaaaattttgaatgatcttaaaatcagagaggttattaaaatgaaaaaccatgtggttcatcagttattcatgtttgtcattcttagaaaataacttctttgtaataacattagaactgtggtttggatatatttgcacagtattttctattttctgattttggcttaataagataaaatatattgcaaaatctgtttaagatacttctgatacatagagaaattgtcacttggaaaatacttttctctttttgtaaaaataatctaagattattgaatgtattttgttttgtagtttgaaaatctctcaagcatattaaagcttcctggtaaaaagacttttaataatatggatagagattttttagaaaagagaaagaaagatctaaatgcatatttgcaggtaagttcaggtttattattactcgtaggtttcattttaatagagcacacaaatacagctgatttctttggtagagaatgtttttactgtaatagtgagatagcagccacttttgaggtgctgagatgtgacttgcaatctgatcagtaatttatgaacattatttctctgtttattaatttagaagttttctggacactcagtgctagaaattttaccttcaggtttgaatgaaaacatacccacacccacacccccacccacacccccacacacgcctacacacccacacctgtacacacacccacacactcagtgctagaaatcgtaccttcaggtttggatgaatacatacccatacccacacccatacctacacacacacacagttacatacacacacccggaagatttcacttcagaaataataaaatgtgtctcataagttatttcctgcgtaaggactgtcagaaataactttattttagaaagtagtacccaaataccagattttaatagtatcactttatggttttttatactaatgaatgatttataaagatgtttcatctgttaatattagctccccacttcactctttaggagtcagcaaattccagcctacagaccatatccagtctgccacctgtttattagagtttattatattattagaacacagccactcgtttcgtttactgctgtctatgactacttttcggagaaggcagtggcaccccactccagtactcttgcctggaaaatcccacggatggaggagcctggtaggctgcagtccatggggtcgcgaagagttggacacgactgagcgacttcactttcactttttactttcatgcattggagaaggaaatggcaacccactccagtgttcttgcctggagaatcccagggacgagggagcctggtgggctgccgtctctggggttgcacagagttggaaacgactgaagcgacctagcacaacagcagcagcatgactgcttttacactactacattggagttgaatagttgcagcagactatggatcacagaactttaaataattattatataaactgtacataaaacatttactggccatgtcctaatatttagtgaaatttagccaatactatacttgatattttgggggaagttttctctctcttaaatgtttataagtctaactgagtttgcttacaactattccatagcactacagtttactgaaaggatagaaaaaacataaatctgttgttactcacctttgtcttctggctcaaggctaaatgatattatttatatgacttgttaaacattttgattttttagaatgtattaactttagttgcattaaaatctgtatcaattatttataaaatttagaaaataagcacctttttcaaaatctggtgccataaatgtatgttttagttgtggctgtactgtctgcatcttacctaatgatctcaatatgtctaaacatgtttcattgaaggaattaagctagaatgttagactatatcatgttgtaaaagcaacagtttgttttggttcctctttataatacttaaaagttttaattttaattgttttatgtactttccattaacggtaactttaaaattagaacatgaataacagcagtttactactatggctcttcttagttataagctgtaaaacctgaaaatggaatagtaaataacattttggggaattccctggcaatccagtggttaggacttcacacttccactgcaggaggaactaagagcccacatgctacgtggcaaggctaaagtaaatagataggtaatagataaatgtgttaatattttaaaaaataatgacagcattttttactatacattcttacctttctagcagatgacattgttagtagtagttaatttccagtaccctatcaatataagatgcctcttatttttcctgttagttactgttaactcctgaaatgatgaaagcgtctccagccttggctcactatgtgtatgatttccttgagaacaaagcctacagtaaagggaaaggggattttgctcgcaaggtaagcagaccattgcattggctttcttcataggtctgttttcttactttgttttcagtaaaagaagataatttatgtgtatgttttaaaactagaaattttattaaatgttctttggtatcttctgtgctttatcaaagagtcagacacgtctgagtgactgaactgatgttttatcaagcctactatatataggcatatctaataaactcctgtttttacatgtagattaagatctagtagtagctggaaaggggaggggaaaaaaaaataaaagccttgtttctgaagtgatgctctaaggaaagttggcctaagacaagccacaggctttcattagttttaagaaggagctgttaatccttcttattgggaggaaatgtcttttaattggagtaaggatagtaaaaatgttaagaagactctgtcctaaaagtatttatgccttttgagtgaaatagttattatttaaatttttagggacacaggcctgttctggaaataagatgctagattaagacaataaatgatttactgctcaggttgggtgagagagctcactgggtgagaaggcaaacagtggaatcaggcagcgtttggttcaaattcctgttctgccatttattagttgtggcctgcaaaatgttacttgacctctgggccttttgtttcctcaagattgaaggtgttaatcctcaatttagagcatgtgtgaatcaaatgaaataatctatgtatgacagtgcctgtctgaatcagtgttggctcttagaagtagtaacaatagtaacaggagctgcagcattagttggggaaactgtaagtaggaattctgtgtattatttttgcaactttttaaaactctgaagttatttcaaaatgaaaattagaagacttccccacctctcatcccctataaaaagattaacttgtttaaaaaagattaaggaattggtacaactaagaattaacaactgtaagaacttcaaatgatctctcaaggatactatggtttaacatccaagtgaatgttaatatttctaaatggaatgttttattttaataagaaatactaggttatgtattttataatgatgggaaaatatggtgaccttatctttgtatttcatgattgaagtgattgagttttaattccaactctaaaatagctttattgttattggagatgcatgttaatattccatcttttttatgtttaccttagtttctctcttaagattgcatctatttgagataaattataaattgataatagccttttgagataaaagaagcattatattgtttagtcgctaagttttgtccaactctgtgactccatggactgcagcatgccaagcttccctgtccttcactgtctcctggagtttgctcaaactcatgtccattgagtcagtgataccaccatccaaccatttcattctccatagcccctttttcctcctgccctcaatgtttcccagcatcagggtcttttccagtgagttagctcttcacatcaggtggccaaagtattgaagcttccgcttcagcatcagtccttccagtgatattcatggttgatttcctccaggattgactggtttgagcattatattaaatgtaggcaatttcttttttaccaccctacagtatgtgtgtgtgtgtgtatgtatgtatgtgtttatctccaaatagttccatgtcacttttaaaaaaaattactactagagtctaaaaatccttttgagtcacttctgggaatccacagtagcatacattttcataaatcatattaataattactaagttcatcttgacatctttcagattgttgggataattttcatgaatatcaagagttttcagctacatttcctttttggataaattgtagtttaatattttcctttattgtatttcactggaaattaaatagctattagagaaaataatctacaaacattttatcagtggctagtcgtgttggagaagactcttgagagtcgcttgggctgcaaggagatccaaccagtccatcctaaaggagatcagtcctgggtgttcattggaaggactgatgttgaactgaaactccaatgctttggccatctgatgtgaagagccgactcattggaaaagaccctgatgctgggaaagattgagggcaggaggagaaagggacgacagaggatgagatggatggcatcactgactcaatggacatgggtttgggtggacagggaggcctggtgtgctgcggtttatggggtctcagagtcggatacgactgagctactgaactgagctgaatcagagcttgagaaataatactttataacacattatcttggtcacacaatttgcctagctttgcaaaatttatgggccagttcctagaaggaataatagacaagtagtcttcctctatgcacacagtatctttccagcttttttttttttatcatagtgtaatggcatttttaagctgtaaatagggacctaaatttaaattcaaattcccttgtttgcatttttaactgatacaaataactgaggtgacaattgaatgaatagctaacatctagttaagtcaggcaaagtgtacactttcgcaggcaatcaataatttacttgtctgcttggtaatttgtaattgtctttttgtttttttgctctaaacatcttttttaagacatatcttgctgctggaaatgttagattgtgatagacttattttatgcttctaaaattctacttttttcatggttgagagacataatcatgtgtagaggtttttccgtggtcctttgctccctccactttccaccaccaatacagatgtttaagctttaccctcagaaattgggtggtgaaaaaatagaaacaaaaaggaaaatggatcctgaaggtctaggattggtgctcagacagctatttttaattattatgtaactcatggtatagatttaagttctcttattttgaaagagtattagtggtaggtagcctcatgcctgggcttcccaggaggcactggtggtaaagaacctgcctgccaatgcagcaggcataagaaatgtggatttgatccctggtgggggaagatccccttgaaggagggcatggcaccccactccagtattctggcctggaaaattccatggacagagaagcctggtgggctactgtccatggggtcacaaagagtcagacatgactgagcgacttcactttcatgcattggagaaggaaatggcaacccactccagtattcttgcctggagaatcccagggatgggggagcctggtgggctgccatctatggggtcacacagagtcggacccaactgaagcgacttagcagcagcagcagccttaagcctggacagcaactgaggttgtattcatttaaccaacttaagattgtattagctgaacccatgtttccactgtgaagtgtaagatatataaaattctaaagtacttttgatggtgttcaaacaatttttaatgtaagttatagattcaaatgaaattcgtgccttttatgcttctgaaattctcccttatctgtgaacattaaaacttcgttgaatggtggccattttcctaaagttgtacattttaagtgtggtattctcatgtttatctctcttaagaattcttgtgttctaaaacactggcaatagtgtcagtatagaagtaatgtcctgactgatttgaacacactgttctggttaactgaaaattactattgtatatagaattaggattaacacacatacatatatattataattttacacccaaatatgtatatgtatatataattgtacacacaagttcacgtgcacacacgatggttaacttcttctttttatcgtttttaatctctgtatctcttcagtggcagcagttttcaagcttctcttcctcattcctcacctttggttctactatgaatttgttgtactgtgacagtgtccctcctagaggttgtattttccagcaagcatatctgtaagactgctgtccctgcttacgccagagaattattaaaacttttacagttatcttgaaattcccttttgttgttattgtttattacagtacctatttcaccttttctggttttcttgttgaaaatcatgaaagcatattaaataattttatgttattaatatctcttaacgttgtgtttcttaaacagtggggttcagtgttttttgctatgattgtttttgtttttttttcttcctgcatggaacataatttgtttctatggtagtctttataagattcgactctttcaggaaaatattcttagtattgtttgactttggtttggtgtctggtttttattttctgctttccttcccttcctcctcctctccctccctcctcctctctttctttctttcatttgtttgtttgtttttatctgttaaaaatcaagatcccatatgcatctactttgggttctttattagatggctctccctttcttaattgaaactatctggcatctattacagtcaaaatgtcaattttaaagcttcctatccctctgagattatttatttatatatctcttagcatattttctttatggtttttctattctgcctcagtaaaatatggcttgcatgtctgatttgcagcttctctttttcctaatagattccagattccttccatagattctaatcgaggatgaaacctatcctaaaaactactttgttaaataaatcttagctctttgagctttctgtttgtttattgtatctgctcatttacttttcaatattgctcagaatatctatgtcattgctgccttgaatcacggcagaagtatgttatagctgtttatacttggatccaagtttctgtttgggaaaactcttcatttttttcagaggttttcttagtaagaaggcaacccaaggtttatattcattttctttcagtaaatatatcacttgtatatttgtgtctgaaaatacattttaaagacactctaaagacaacagttcagtacttttaaaaggcaatgagttattacagactggaaagttattacacctttcgtgtgttgcacttggtttatgaggcttttcagttgaataataaacttgatacagtgaagtcatgatataatatcttttccctttagatggacacttttgtaaatccacttcgaaattctatgaggaatgtttcaaatgcagtcaaatcccttcctgatagcttggcagagggaatgactaaaatgtcggacaacatgggcaaaatgtcagaaagattaggtcaagatataaggcaatcatttttcaaggtaagaagatgttttcagtaatgtctgaaggaaatgatttttaagtcaactaagatttactgagctcctgcttaggtttaccttatttctctttgtgagtccaaagctctctagacacatagtctcataaagaattaaaaagctaaagagaattgattatcagaagtggatactgtaaaatgcactcacttctcagtctctattgcagtacaatttaaaaattaatttaaagcacatttaaaattagtgaagttaacattctttgtactgttttattccattataccatatttactctataatgttaaaatttatagcaaaacaagtacatgctattgtataaattatactagtattcatcagcaaacataaatttctcctgagtcacatgattaagattcacgagatgaaagggaggaagagtctttcaacatcatcaatccttagtatgtggatacctgtgagaggaacagaggagtttgcttgggagcattttcattatactagtagtggatactggtgaatcaagtagttttttgcttcctaatgtacatttttaaaaataatttcgacctagttgtttaaagttgtaatcaagactatgaacgaaatcatgtaggtattagaactttgtttgttagatcatgtttccatgaagaggaaatacatataaacacagatagaatttatttattgtaagagacaattcctaaaatgtcgtgtgtgtaaatcatactcttctgtcaactctcatatcttctctgatgctccatctgaactcctaatcgtggggcagtgcactaacactgaagcaagggttgtctggtgccgcttctgccggtaactacccatatgacttcatacagaagtcgctgaacttttgcaggcttctttttcctgaccagtatgtgcaggggttataacaggtgatcttggtggtccttcctatactgagaaatgattaccagctagctcgagggtctttctgtcccttttctcaatagcttacgttatgtaaaaattagttattagtttctttcagcctgttaacatactgcaaggctctttatgatagaagaaaaaagattgcaattctattctctgactgtgctattcacttttgtctttaaatcatttaacatttcttagctttaaattctaaaaagtatggaggtttgaaagactaatatctccttccaactcaaaatgaatcttttttttttttttaaggaaaaaaaatctgttgatagtgaagtaattacccttttatatttggtttttaactttagattgttaatactttgttaatgctctataaattttatctattgtccccagaatcaaatcaagtgctctttattatatttgacacttgtttcagtttattatcttgtgttgtttcattttctgctttagtgtgtttactttgttgttgttgttgtttttaatactaggttcctcctttaattcccaagactgattcagatcctgaacattgtcgagtttcagctcaacttgatgatactgtgagttaatttttgttttggtagcagtcagttggaattcaaatcatactttgcagatctttttaactttttaatgaactataatatgtatatgtcattaatgtactcatattttaaacattaagtttgatgaattcctacaaactgaacatacccaagtaaccagcactataaacaagaagcagaacgttgccagtaccccagaaagcccctaatgctctcttcctatcactgtcctgtcccctgccaaggatagtcactgtcctgacttctaccctgcttttatactttatatagatgaaactgtaaggtatgtactcctttcagtctggctttttgttcaacattgtggtagtcttccatgttgtctgtgtgacagtggtttcttcgttcatgtggccttacagtaccacattctgtaaatataatacaatttatttgctatgttatgaacagtactcctgtaaacatttgggtacatatctattgattaaataagtatgtatacatttctctctgtacccagaaatggaattccttggtcaggggttatgaatatattcaattttaatacatactctcaaatagttttccacactgttgtaccacttacattaccatccgcaatgcatgagaatttcagaggttcacagcctgccggaattcaatatgtttatgttatgcctttttaattttagccattctggttgttgtatctcatatggatttacatttctctgatcataagtctgttgtccatttgagtgtcctgtcttatatgtctagtcctttcccccatttttctattggcttggctgtctgtctttgtctttgattagtaagagtacattgtataatctgagtattggttatttgtcagatacaagtatttgtatattgtaaatatcttccaccttgggtgcttttattctcagtgtataatgtgtctactgcacagtcacatagatgttctcctatgcttttcttcaaacatcatttttcttcaccatgccaaaacttagatttgctattcatctagaattgattattgtgtgtagaatgatgtaggagtccagttgacctaagcactatttattgagaaggcctgctttccccattgtatgtttctcccttgttacaagttaaattattttatatatttgtgtctgtgctttatattctgtcctattatgcagatttattttaaagttataattatccccttcagtttctcattggatttctttacagtaaactgtcttaaagataatatttttgtttttcaagaatattttagaatgtttatatgtgttgtactgttataatatccataacattatgccttttagtaaatgtttataatttgttcattagaattgttaggtggcactaaactcatgaatatacttgatcagagaatagagcagtactgagagcatataagccatgaacttttgatatgtaaagagaaggcacacttaagaaaatgtttacaacacagtgaaaaatgaatgactcgtgctgttttctcagtattcaaattgcagcattgatgaggaaatagaaaagagtagcttcgtgatcaaagaattagaaaattactagcaattacgcagtttgttgcagttctggatctgcacctttcttgttttctctatatatttccacatcaaaggattctcattgtctttctttactttttatatcattaattgaatattcccatggtgaaagtgtacaaatttttacttgttaaaaattaaaagaaaattctagtaatttagtcaccttttgtaatgttagctgtgtactggattttattttaggttctttattgtaagaatgcctaatatgtacaactcactaaccaaacaaaacaaaatgttctgtgtagattttattttgttctattgaataaaaagaaatgttgagcatattttgtccttttgaaaaagctgctccagagaataggcagaggggctagctagcatgtattgtaaactaacagagactctactaaaagatcccaaatcctaaggtcatcatgaatccactttgagaagtttttttcagcgcagctttggagtttactcatcattgtagatttgttgaattctgttttctgtcaaaacagatgttaaaagtattttttgctaaattagaataaaaactcagttataaaggctatagtataacttgttctccaacctgtaaataatagtaatcatttggtaaaagcaacaaaattagccattcacaagagatagataactcaaataaatgtatctcatttcttcccattgttttctcaggtggatgataatattccacttagggtaatgctgcttctcatggatgaagtattcgacttaaaagagagaaatcagtggttgcgaaggaatatcaaaaacctacttcaacaacttataagagctacatatggcgatactattaataggtaccacttttttaaaaaacagaaaaactacttagagctgatcttacttagcttttaaagttttacttttagaagtagattgcccaaacttttgtaggggaatttctttctgtgggcctttgaagaaggttattgaagcattctattgctctcagagataatctacacacaaattaagttgcttactccatgaaagaagtaatgtttctctatttgatttaccttctaaaatcttgaccatactcatttaaatttctttactttcagaaaaatagttgaccatgttgattggatgacctcaccggagcaagtagccgacttagtgaaacgtttcaggtatatctttagacacagtcttccgcaggtagcacagagttgagcattgttatcactaacttttattgcgttccctttctttttggccgtaacattggttttaatcatcactgatgagcaaaaagacttgtaaaaattataataaacatttatcccttggacttattaatctttgttttctttagaaccagaatagaaaaaaaaaattgtaagtgaaaaagctttttagatcttaggctacattttatcacagtaatgtggctttaaaataattgaaatattagtatagacatggcatggtcatataatcagattaactagttttggagattaatccttctcagttgtatttgctaactttgattttaagtgagatattttagaaatttgtttgtccctgaccatggtctaaatttttatttagacccttctatttatttttatttaggctcttttatttagaggttttatttagatcctctgaaaaggttcagattaagagcagtgatactccagttcatatatcaattctccaaaaatgttctcagccccttctctgtgtctagcccacttaactggggactgagaggtaagattcagtcccttcaaggaatgcatggcacagcagagaaataaacatcttttctaacagtgagaggtaagcagaacacaaatatgcatggcatcatgtcctttgaagtaacagaaacaaggcaactatcaatagcgtacagtatttatttggcaccgtccaactacttgactatggccactttctgattttatcctcctttacgagatagggatttttgtttccattttgttacaaggaaattgagaatttgagaagttcaacatcttgcccaaaggctcacgtgctagaaagttggggaaacaagtttctctaatctgaagctgagtttctcctcactgtaccatattgtttctaaaagctgaactgccttccctggcatgttgattctgtttcagggtgggtaaatgttgttcctctggagggcacattggaatcacttgaacagctttaaaaagtactgatccttaggtcccatttgcagagtctgacttaatgcatctggtggaaggcctggacattgagtgtttaaagctcccaggtgtttctaatgtgcagtcagttaagaactgttctgcccaggctctctctgagaccagatcccaggtagaagcttagttattgtgcttaattcctctcattggcttgaagaactaagaacagtaatcagcacactgtaaagtaaagaagaatggattatgtaggtgaaagaaacattgtaatcaacatagctgtaagatatgggtgcagttactccagggcatacttttgttattcttttcttgtgtaaaccctgcacttagttactatctgttgaatatcacacctgtatagaatttcagaaatgtttcctttttctgtttgcgtttgtgttttctgtagaaaattagaataattttaccaacttgtatcattagaaaatgaagatgtttacaaaatttatttaatcttcttaaatagagatgccttctggccaaatggcattttagccgagactatcccatgcagagataaaggtattcgaatgagaacaagagttgcaggaaaaactaaattactttcaattatgccaggtaagtgaacatttttagcataaatctcaatttgtacttcggaatttatggcatgcattgagcatgccaaatttagctgccttttgactataataacttatcaatttgatggcttatataccaggaggcattttgctagttatttctcatatatgtttaactaatcctcataacaatattggagaagaaaatggcaacccactccagtactcttgcctggaaaattccatgggtgaaggagcctggtaggctacagtccatggagtcacaaagagttggacacaactgagcgacttcactttctttctttctatagttccttttggagcaggagatgacaacctgttcttgcctggagaatcccatggacagaggggcctagtgtgctatggtctgtggggttgcaaaaagtcagacacgactaagtgactaacacacacacacacacacacacacataacaatattataaagcctagggagctgttaacagcaaaaagtcagacacaactaagcgacacacacacacataacaacattataaagcctagggagctgttaacatcacagctttaaatatgagggaaaaaatcagccgaagggggttgagtgtaaatacccaaggtatctaccttggaatagatggtaaagaatctgcctgcaatgcaggagactggggttcgatcccgggatcgggaagatcccttggagaaaacaatggccacctactccagtattctttcctggagagttccatagacagaggagcctggtgtgctatagttccatggggaattctgtggacagaggagcctggtgggctatagtccacagggtcacaaagagttggacacgactgagcaactaaaacacacacacccgaggtttaagcagtgagtattggaactctgacttagctttgagttcttgaaaccactgtattcaaccacttcagtaaaaattatacttttaaccacttcactttgctgtcttgaaacattttaagaataaagttgatgataaaatctgtgacagatgaaagtgaaagtcactcagtcgtgtctgattctttgtgaccccatgtatacagtccctggaattctccaagccagaatactggaatgggtagtctttcccttctccagggaatgtccccaacccagggatcgaacccacgtctcctgcattgcaggaggattctttaccagctgagccacaagggaagcccaagaatataggagtgggtagcctttcccttctccaggggatctccccaacccaggaatcaaacaaggatctcctgaattgcaggcagattctttaccaactgagctatcagggaagcccatgacagatgaaagggctaataataaagtataatgaagtatgaggttttcggaaaaagaatatttgttctgtttaagagaacaagcacattttttcaaagaatccctttgaaacatgcttaatctctgctaaaacatggtcctaaacaaagtatacatggtcgcattcttttggtgtaatttgaattattttagaactctgctatctcactaacttagatttactttgtccatttgtcttctctcagtaagagttttgtttggttgggtggttgatttctcctctggtgataaatgtcttttaaaatacctagataactcttctccacattttaattatggatgtagggaatagaaaaatacttaagttttcagtatctatttcttttcctataattttgtttttctttaaattttcattatagattttaatctataattctcttctgtccattaaattggatatttgccacatggctatttattccactcgactatactgttgcatttggagataaaaagcaagttatagaaataacattttagaaaaataaagggaaacagtagcctaggatattaatatacttttataataaaccagatggtgctttagacgtactcagttacggagtagaaagaaatcttaatgcatttgtacagtaaatatttattgagagcacttcgtgagccagacactattctttacactgatctttgcctccttagagtttacattccactaggggacacagaagacatacaaaagacatagatgaagcacagtatattggatagtgctaaaagccaaggagacagatagtgcaggaaaatggaaatgacagccgagttgcagttgtgaatggatgacacttacatgaagacttgaaggaagtgagggacgatataaaaataggtatttttatatgtacagaattcctcacctgttttttagtgaatttaaaacctatttgcttaaaattatattgtaccgtagttagaaacatactttttgggagttgcatgtttcttttgaaagcaataaagtgttgtttggggggccctgtttataaataattaggaatgatcctacatgatgttcccatactcaagtgtctctagtaacttgatgttgcctgtgagtaaactccaaatgtgctcaccctgccggttgaagcactgccagttttccattcttttcaccactttcttttacaggaatcctaaaattgagccaaattgttctaccccatttcttgagcctgtcttttttgtttgtttgtttgttttccccacttggtgctcatttccttatacatgttcttaaatcctttgtctgtttgtaccaatcagatcctgccaatgcacttagtgtgttgcaagtttttttaaatcagagatcaagtttccacatttctttgtagtatttctcattgtgcattagatggagaatatttttatagtgttctagagtttacagatcacttttcactttatctcatcaaagctttataaattctcacagtaataatgatgttggttattataaattcccattttacaatgaggaaagaaactcagggtgagtgagttatataggtattaagggacaggccttcccagatggctcagtggtaactaatccgcctgccaatgcaggagacacgggagacgtgggttccaaacctgattcgggaatatcccatagaggtggaaatggcaacccactcaagtattcttgcctggaaaatcccacagacagaggagcctagtggtttgccatccatggggtcacaaagagtcagacacaactgagtaacgttaagggacaagattataaaacttaatttggggtttctgagtctgggtcctgctttctctgttgttatattgcctcccaataccacacaagtgtgtgcctaattgtgacatatataagttttaagtcagttattaaacttatattaaggtcattcactgaatactggttatttatcagtcactcaaatgtgtactttacatgttttaacttagaatacttttggccttgtatttcctttgaataatgaattgtgtttatttcccctccccttacttagatgaactgaagcacattattggagctgagacaacacggaaaggtattcttcgtgtttttgaaatgtttcagcacaaccagttaaataggagaatggtttatgtctttttggaaggctttttggaaaccttatttccacagtataaattccgtgaacttttcaacaaactgcattcacggtcaaagcagatgcaaaaatataaacagaaacttcaaactactcaagcgccttctttacagaaaaggtgacactccaatctctgaaactggtgttcattttgtccaggactaatggtatggacggatcttctggggcttaactcatacactgtcgtgtctgcaccagtcttttagtgtctcagaatagattattaatacatcatatgactgccattcttctcatcattgtctgtcatccagccacttgtaccaagagaaatttctgtgtcttaaatgatttggtgcatatttttgcaacactgagaggatactgcctacagctcaagcaagaatgacattggtttcttccgtttcaaactaatcagcattctccagcaatgacaaagtgccagagtgtatatatgagagttaaggaaagcacaaaacaatggttcacagataaaattggctaatttgtttaacagtgggaaactgtgcaatgtactgtttggaggggtttcttttgcataatggttttatatatctttttcggaattttgatatagtgtagattagccaggtgaatgatctttgaaacatctgtttcaggtctagggaaaatgacagaatgcccttgaagtatgaagtgacattatatccaaattacactttttttgttttcatgacataaaaacctagtgtaaaataaaaccagtcacaaccaaagtttgattggatttgttattcattggtagaaaacagattttaagtaattcatctatgtcttaagggctctagtttgctcttatggtactcataattaagtttcattttggcattctgtgtgcaaaaagaagcatatggtggctcttacttaagttttgaagttattacagctttctttaagagattattgattatataataggggctagaatttgttgaaggaactgccaaatacttcttaaaatatggaaattttaaaaaagtactcttgaaagttactctatgataattttaaattgtgtgatctagacatacgttaggtgattgcaaaaatagcaaatcaaaggattaaatgagcttataagtcatatgtaaatgtacaaattcctaactattacagtgtacatatatgaaaagaaataatgaaaacagaactataatattttttaaaatatgcttttatttatattttgcataatgtaaaattctactaaataaagcaagttggcaaaacccctcggtgtatacatttaagtccctaaaataattttataccaacaacaaaataccttttccagtttcggagcttctgcatttcctatagttttctcagtctccatttgtccatcttggaagtcttcatatgttttatatgcaggatttctgcatagtttaacttccactgactaagtgtttgggcatctcagcgttttttgttttgaaaatatttaacactaaaaccttataatagtgaagctatttatcagaccactgagccaagatgctggtgttaaaagaacttccgggtgcttaggataaagggacagaatattggtatcccagttgtttgggagttttaagattgggacaagatggtattgtcttgttcttgctgagatcctacttatgaagcaaagcctgatagaataaagccttcctttaaagctttatgataatgatcatatttattaataatgctgttatgcatacttatagtttgcatatattcagcctgtgttgcatgtcttcagaattacataaattaaatccttttcatttaaacttccaaatgagaaaagatctttattgactctggtggaagaaataatatttcttctcaatgtatcttcctgccccaggctttagaagaaacatgtgaaacatgtctgtaggaagcatcagcatggccgtaagtgcaatgattttcagatacaccccccacccccgtttccagtatatttttgacataagtaaatattaagagtaaacagaattcatgtaagagtctactgtgtacatgtgaaaacgcattactagataatgtgaggaacgctggccatcaaccagggaaaggtcatgcagtattgcagattttcatgaagccctgcaagataactgcagtcataccaaaaactattagagtaagtgggtttttaaagtaatttttctttaaaagagtttatatttgaaaagcagaaatgtcaaatggtagcctatgtaaatggttgtgcatcttctctttgcacatctgtgttttacatcagagaaggctgtggtcatgctaaaattagatatactttttgagtgatttggtcgagctgtgtgtaaaatatttaacccataagtacagtgtactatgtttaatgaagttactacatttaatgcatttattgcatatatgaatatatacaggaagaggctttatgtcttctgatatttgatttttgaatgtgtttttaagtcagtggtgcctttaggcaagaaccttcaaaattaatcattctttgagtttttctgatttttcaggtaacataaactatttagaaaccatcactactaacttacagttcattcctctaaaaagttgattgtatgatttaaatgtaatacttagatgggcatttcctgtgattagggttttctgaatagttgctgaaaataattgtgccattgaccaatggatgcacgtggttagccttaatttttattttaaaaaacatttaaaactttcttgaatatagcagttccttcattttaagtttctgctgcaggtgtttagaaaaaaatcaaacagttaagcactactagaaagtgtaccaattttttaaaaattaagaacaatataaaatttcacaatctaaaattttaatttgtgcaatattttcatttaatgcatgtgtatttgagtaattgtaaaataaatgaatttttaatgttttgagatctagttaaactgtcttcttaacccaacaacttacattccgttgttgttgcatccttttatttaaggacttgttttaaaagtcgttttgtcactccttgtaaaattcttttgttattagtaaattttgcttataggagcatggctcctgtattacaagggaaaaatataaagagcacattttaggattacaattgtttaaagataacttgtgcatatcattgtacaataagtgtcaactgtgtgcctaactattctatcaatacttctttaacaaagaagaaacagcaatcagaatgtcagttatttttattgaactaaaaagatttaaaattttatttggtttgcattatgttttgtccattagaaaatactaataaagtattaacaaacctttttgttgaattttatttcatagtgatgtgtttttattacttttaaaaagtgctaaagttcagttgtcttacctttagtatctgtgtgtattttcctttcttttcaatttggaaatcaagcaattcaagttccaggttgatggataaactactgggtgattactgacttactacaacaaactgaatttactttttcctttcaggggacaagtaatttactacctcagcgttaaagaaacttcatataattttcccataaagggagagacctataagtaatctggtaacaatttttgtttgacctccttttaaattcctaacatgcctgctgtgatgaggtttcaggtttaaaggcagtagatgcagtactgtgcagtgtagctctgcctcattggtcatagtatttgcagccatcgtggctctggatccacagacctcagacatcagtgtgactactcctcccctaccaggggcagtcacattgtttctcaaaatacttgctgt

SEQ ID NO: 144 - DNA, 1213 bp, Hippotragus equinus
  source 1..1213: mol_type = genomic DNA
gcctcttgatgaaagaggagagcaaaaaagttggcttaaagctcaacattcagaaaacgaagctcatggcatctggtcccatcacttcatggaaatatatggggaaacagtggaaacagtgtcagactttattttggggggctccaaaatcaactgcagatggtgactacagccatgaaattaaaagacgcttactccttggaagaaaagttatgaccaacctagatagcatattcaaaagcagagacattactttgccgactaaggtctgtctagtcaaggctatggtttttcctgtagtcatgtatggatgtgagagttggactgtgaagaaggctgagcgccaaagaattgatgcttttgaactgtggtgttggagaagactcttgagagtcccttggtctgcaaggagatccaaccagtccattctgaagatcagccctgagatttctttggaaggactgatgctaaagctgaaactccagtactttggccacctcatgaaaagacttgactctttggaaaagactttgatgctgggagggattgggggcaggaggagaagggggcgacagaggatgagatggctggatggcatcactgcctcgatggacgtgagtctgagtgaactccgggagttggtgatggacagggaggcctggcgtgctgcgattcatggggtcgcagagagtcgtacacgactgagcaactgaactgaatggtactcattgtgaagaatttttacatcaatgctcatgagtgatattggtctgaaattttcttctggtatcttttgttagggtattatggtaatgctagtctctgagaatgagttaggaattattccttctgtttctgtcctctgaaagagattgtagagaatttgtgtaatttcttccttgaacatttactggaatacaccagtgaatccattttagtatgttgtgttctgttttaggaagttattaattactaactcagttttctctgttgctttatcttttcctattcctattatgcataatttacagcttttgtagttgtcctacagttgactattctgttttgtcccacccccagttttggtggtttctattgagataccctcaagtcagaatcttttcttcactatgtccagtctacaaataagcttattgaaagcatttactttgttacagaattttttttatctttatcatttcttcttggttct

SEQ ID NO: 145 - DNA, 434297 bp, Hippotragus equinus
  source 1..434297: mol_type = genomic DNA
tacttattattttattatgtattagactagtgcatttcttatttgaacacttttaattcatgtcattgagtgaaacaaagtgataacaggtgatatattttatattgaggtattttaggttttgcgttttttttttttttttggtattataatgctgtgagtattataaagtgagtttctttcttctattttagatgatggaaagggtgattaatgtgtaagctaacatttgtctcctaagagccaaaaatatggcataaattttttcagctttttgcattgatggctttgatgtaggggtcctttgcttagggagaggcatatttgaagctattttatttatttattcttccaggtatttgctgtttatcctgaagctcagctgaggcagagctcagctgctctctgtttcttgattgttcacttcctattggccaaccaagacttttattggagaattctgttgtacagagcctgacatcatttgtgggccgtaacaggagcatgcatttgcaagtgtcagctagatttgtggatcaataaagttttcttgaaaggtaagtatatgttcatttcaaaatgtacgttttaaattcagtgctattaacatctgtcttagtctgttctggcttctataacaaaaatcccatagattgtgtgacttacaaatcacagaaatttatttttcactgctttggagactgggatgtctaagatcaagatgctagcagagttggtgtctgatgaggatccacatgctggttcatagatgggtgtcttcctgctgtgccttcacacggtgggagaatagagttctctaccgcctctgtttataagggcaccaatcccactaatgagggctccatcctcaggacctaatcacctcacaaaggcctcactcctaggccattacgctgggaattaagatttagttttggggataataacgttgatttcatgatgataccctatgatagttatcatgatctgtcttatagacttgtgtacagaagtgtgtgctgtgtgctcagtcacgtccgacgctttgtgatcccatgtaccatagcccaccaggctccccatccattgaattctccaggcaggaatactggagtgggttgctatttccttctctgtgtatgggtatacgtgtatgtatgtgtctatacactcatactgagtttagattgcagactcattcagggaataatgttaccctgtaacacagagttccttgacagtttctttccatttatctattgacccaccaacttctggtcttttctttttcttcattgttttccttccttcttaattaaactttcactgggctttaaaaatattttcccaccagaatactttcagcccttttcttactgaatactttactttttgtattcttatctcttttcctttttcttcaccttttttctttctttctttcctactttcctacctacttacctacattctgatgttcattaagtttgttgaaggagttgcaaacttagaatgattaaacttaaagctgaaggtatatcaaatagataggatttacttttttatttttaaccacaacccatagtgagaaataaattttgcgttgatcagacattttcctcaggcataaatgcacaaatgaagctaacaaaagttgaaacaattctgccttggctgccttgaatgtgtactgtgttctattttattacattttttgtaaacttcatttaatatatgctgatacccataattacatttatttccctgatcaatgatggatcacttttgcaatttcaaaagtcctactgtagatcactttatgactgacctgtagggaaaataaatggaatgaggcattgttttctctttcagtccagctgcttttctgttgtcttctgtgtgcttctcatttcttttgattcaagtcatcagatgacttggggaaagaactgtgtaactgtgtaactgctgaaaaatattggagcactaattggttcttttacagtaagaacacagataccagtggtcatgtttcaaaatataaatggaggaaactctttaatagaaccattcctttatagtaaggtgaatctttaacagctctgttctttgctttctgtctgtaaactgagcatgctgatgctctcatcattcctgctttacaatatttaaacttccaaagtcctttacagatttttttcccccaaagtggtctattctagtgttccttctgattttattgaacatttttatacttttcacaaattacaaagagttaaaagttaaaaatgtagtatattttttagaaagattagtatatgcagaaaagtaaaaagaagaaaaaaaattatgctcaatccaatgtattaaaagctaaaacagttctaagaggtaagtttatagcaataagcacctatattaagaaaggaaatctcagggctgtccactatcttcagttttattcagctcagttttggaagtcctagcctcagcaatcagagaagaaaaagaaataaatccatattagaaaggaagaagtacgactgtcactgtttccaggtgacatgatactttacataggaaatcctaaagatgccaccagaaaactgccggagctcgtcagtgaattcagtgaatttgcaggatacaaaattgatatacagagatctcttgcatttctatacaccagcaataaattatcagagagaaattgaagaaacagttccatttaccatctcatcaaaaagagtacaatacttaggaacaaacctcagtaagaagataaaaaacttgtactcagaaaactgtaagataccaatgaacgaaatcgacagcacaaacagatggaaaaatatatttttgaattagaagaattaatgttgttaaattgactgttactaccattactaactgccagcaaatttggaaaactcagcagtggacacaggactggaaaaggtcagttattccaatcccaaagaaaggcagtgccaaagaatgctcagactaccacacagttgcactcatctcacactctagtaaagtaatgctcaaaattctccaagccaggcttcagcaatacgtgaaccatgaacttccagatgttcaagctggttttagaaaaggcagaggaaccagagatcaaattgccaacatctgctggatcatggaaaaagcaagagagttccagaaaaacattttttctgctttattggctatgccagagcgtttgactgtgtggatcacaataaactgtggaaaattctgaaagagatgggaataccagaccacctgacctgcctcttgagaaatctgtatgctggtcaggaagcaacagttagaactggacatggaacaacagactggttccaaatagaaaaaggagtgcatcagggctgtatattgtcaccctgcttatttaacttctatacagagtacatcatgagaaacgctgggctggaagaagtacaagctggaatcaagattgccaggagaaatatcaataacctcagatatgcagatgacaccacccttatggcagagagtgaagaggaactaaaaaaaagcctcttgatgaaagtgaaagtggagagtgaaaaagttggcttaaagctcaacattcagaaaactaagatcatggcatctggtctcatcacttcatgggaaatagatggggaaacagtggaaacagtgtcagactttattttggggggctcccaagtcactgcaaatggtgattgcagccatgaaattaaaagacgcttactccttggaaggaaagttatgaccaacctagatagcatattcaaaagcagagacattactttgccgactaaggtccgtctagtcaaggctatggtttttcctgtggtcatgtatggatgtgagagttggactgtgaagaaggctgagcgccgaagaattgatgcttttgaactgtggtgttggagaagactctcgagagtcccttggactgcaaggagatccaaccagtccattctgaaggagatcagccctgggatttctttggaaggaatgatgctaaagctgaaggtccagtactttggccacctcatgagaagagttgactcattggaaaagactctgatgctgggagggattgcgggcaggaggagaaaggggatgatggaggatgagatggctggatggcatcaccaactcgatggacatgagtctgagtgaactccaggagttggtgatggacagggaggcctggcgtactgtgattcatggggttgcaaagagtcggacatgactgagcagctgaactgactgaccattactaaggcagtctccatattcagtgtaattcctattaagatatcaatggtgtttttcagagaactagaataaataatttaaaatttggcatgaaaacaccaaagacctcaaatagataacacaaatctgagatagaagaaaagagctagaggaatcacatgtcctgatttcagactacactacaaagctatgataagtttagaaagatacatatgtcagtggaacataattgagagcccagaaatatagcacatgctgtggtcggttgatctgtgacaagggaggcagaaatacacaatggagaaaagacaatctcttcaataagtagtggtgggaacactgggcagatacatgtcaaagaatgaaattgcaatattctctaacacaacaaagaaaaataaactaaaaatagactaaagtcctaaatgtaagaccagatattataaagctcctagaatcagaacactctctgaagtaaaccacagcagtagtttttggattcatttgaaagcaaagaaagaaaaacaacaatacacaaataggacctaattaaatttaaacgttttttgtacagcaacggaagccatcaatagaagagaaatacagcctaccggatgtgaagagatatttgcaaatgatgtgaccaataaggggttaatatccaatgtgtataaatagttcaattaactcaacataccaaaaaatgattaaaaaatgggcagatgaactgaatacattttttaaagaggaaatgcagatgaccagtaggcatatgaaaagatgctcagcatcactaataatcagggaaatacaagtcaaagcatttgcatttgtttgagatagtacctcagtggtgataccaccgtgatgaaattccacgatagaatggctatcatcgaaaagaacacaaataacaaatgttggcgaggatgtggaaagaaagaaaacccttgtaccctgttgattagaatggacatatgtgcaagcattgtgaaagacagtttggaagtttctcagaaaatgaggaaaaaaagaactagcacttggttcaacagtcccactcctgggtatacatttggagaaaacaaaaacaccgtcaaaaagatacatgcaccccagtgttcatggcaacattatttataattgccagtatgtggaagtaacctaagtgtctatgaacagatgattggagaaagaagatattttgtgtacacacactggaatgctagtcagccattggcaaatgatgaaagattccatctggagcagcagaggtggacttggagggcatttatccaagtgaagcaagtcagagaaggacaaaccctgcggaagatcacttatatgtggaatctaaaaccacaggaaatcagcgagtgaagcaacaaagaagcagtctcgtagggaacaaaccagtgtttaccagcagggaaaggaagtggggaaaggcaacagagcggtgggggaaaggaatattgtagaagtgtgtgaaaccaggagtgtggaagttttgaaaattggagagctatagaatttgaagaacagaatttgtaaaacactatagaattaatttcattcaatggaagaaaaaaaaaaactgcacacagagaagaaagagaaaagaaagcccaaataaataactcaaattacatgtcaaggaacagaaaagaacaaactaagcacaaaattagttgaataatgggaaaaacaaagagcacaaataaatgaaatagaaattaaaataacagaaaatatcagtgaaacaaagttttttttttttaagatgaaatagagacaacttaaactggatataccaaggggggaaaaaccaacagcactgaaatacagaagttataagaagctactatgaataattattcaccaacaaactggacaaattagaagtggttaagtttctagaaatatgcaacctatcatattaaagaaagagagaatatgagtaatctgatagattgaatcaggaaagtgctagccacgttctggcacagatggcttcactgattaattctgccaactgcttaatgtagaattaatgtcaaaccatctcaaactctcgcagaaaagagggcacatttctgttttatcaggaaagcattaccctgagaccgaaaccaggcatggacactatgaaaaagttacaaaccaatagctctgatgaagacagatgcacaaatgctcaacaaactgtattcaaccaaattcaataatacattgagactgtacaaccggatcaagtgggatttttctctctctgcagggatgtaagtgtggttcagcatcctgaaatcagtgtgagacactgcattgataaaacgaagggtgaaaatcatatgatcatctcagtagatgcagaaggaccacttgacagaattcagcatccattcatggtgtaggctctcaagaaacaggcatagtggcaacttactaaacgcagtaaagaccacatacgaaataccatagctaacatcatacttaatagtgaaaagcagaaagcctcatagctaacgtcatacttaacagtgaaaagcggaaagcctttttcctgagattaggtggacaagaatgcccaagctcccctgcccgccccactacccccatccccaaggagctgagtattctttacttgggctgtatatcacagtttttgtaatgagtaaccatgaggaaaagatggtgttcctcatattaaaagaaacaaccttaccaattttgtttgacataatactggaagttctagccagagaaatcaagaataagaaataaaaagtattcagatcagaaaggaatagaactttttatttgcaaaggtatgatatatatgttgaaaataccaccagaaaaaaacctgttagaattaataaattcactcagacggtaaagtgtctgcctgcaatgcaggagacctgggttcgattcctgggttgggaagatcccatggagaaggaaatggtaatccactccagcactctggcctggaaaatcccatggacggaggagcctgataggctctacagtccatggggtcgcaaagagttggacacaactgagcgacttcactcactcactaactcactaaagttgcaggataaaaaatcaatatacaaaaatcagttgcatttctgtacactgttttcagtggaggtgatgagcagattcaacaaattcgatctggtagatacagtgcctgaagagctatggatggacgctcatagcattgtgcaggaagcagtgacaaaaccatcccaaagaaggagggatgcggcaaggcagatggaggcttcacagggctgattgcggagcacgggagagagatggaaggcaagggagaaaggaaaggtacacccacctcaatgcagagtctcagtgaatcgcaagcagagaaaagaaagcttttaagaaaatgatgtgaagaaatggaggaaaacaatagagtgggaaagactagagatctcttcaagaaaactagacataccaaaggaacatttcatgcaaagatgggtacaaaaaaggacagaaatggcaagaacctaacagaagcagacgagattaagaactgctgtacgtttgcactcgttccacatgctacgaaggtaatgctccaaatctttcaatctaggtttcagcagtatgtgaattgagaacttccagatgtacaggctgggtttagaaaaggcagaggaaccagagatcaaatacacaacatccagtgtgtcatagaaaaaaacaagggaattccagaaaaacatctacttctgcttcattgactactctaaagcttttgactgtatggatcacaacaaactgtggaaaatgcctaaagagattgtaataccagaccaccttacctgtcttctgagaaacttgtatgcagatcaagcaacatcagttagaactacctggaacaatgaactggttcaaaactgggaagggagtatgttaaacctgtatgtagtcaccttacttacttaatatgcacagtgtatcgcgtgaaatgccaggctgggtgaatcacaagctgaaatcaaggttgacaggagaaataacaacaacctcaaatattcaggtggtaccactcaaatggcagaaagcaaagaggaactaaagagcctcttgatgaaagtgagagaggagggtgaaaaagctggcttaaaactcaacatttcaaaaaataagatcatggcatctggtcccatcacttcatggcaaatagatggagaaaaagtggaaacagtgacagatgttattttcttgggctccaaaatcactgctgaaggtgactacagccatgaaattaaaagatgcttgctacttggaagaaactctatgacaaacctagataactatattaaaaagagacatcgctttgctgacacagatccatctagttaaagctgtgtttttttcagcagtcatgtacatatatgagaattggactataaaaaggctgcgtgttgaagaattgatgcttttgaactgttggtgctaaaaaagactcttgagagtcccttggacagcaaggagatcaaaccagtcaatcctaaagggaatcaaccttgaatgtccattggaaggactcgtgctgaagcggaagctccaatactctggccacctgatgcgaagaactgactctttggagaagaccctgatgctgggaaagattgagaacacgaggagaagtgggtgacagaccatgagagatgagacggttggatggcatgaccgactcagtggacatgagttcgagcaaactctttagatagtgaagtgcagggaagcctggcatgctgtaatccatggggtcacaaagggctggacacaacttagcaactgaaatacagcaacaacagtgaactgtcagagaaattaagggtatagtcccatttacagttgcgtcagaaagaataaaactcaggaataaattttaccaaggagttgaaagatgtggacactgacgattataaacattgatgaaataagctgctgctgctgctaagtcgcttcagtcgtgtccgactctgtgcatccccagagacagcagcccaccaggctcccctgtccctgggattctccaggcaagaacactggagtgggttgccattgccttctccaatgcaggaaagtgaaaagtgaaagtgaagtctttcagtcgtgtccgactcctagtgaccccatggactgcagcccaccaggctcctccatccatgggatcttccaggcaagagtgccggagtggggtgccattgccctctccatgcaataagctgaagtatacacaaagaaatggaaaaatattctctgcatatggaagtgaagaattatgttgctaaaatgttcatagcacccagaacaatctatagattcagtgaattctgtatcagaagtcagctggcatttttttgaaaagcaatcctaaagtttgtatgtatccacaaaataccctaaatagacaaagcactcttgagaaagaacaaagcggaaagcaccacacttcatgattttaaactttattacaaagatacgataatccaaacagcatggtattagcataaaaatggccatatagactaatgtaaaagaagtgagaacccagaaataaaaccacacttggatggtatattaagttatgacaaaggatctaagactattgattgggcaaaggatagtctgttcaataaatagtattgggaaaattgggcagtcacaggcaaaggaatgaccttggcctcccatcttacaagatatacaaaaatcaactccagatggattaaagacttgaacacaacaatttcagtataaacttcatagaggcagatgggataaactgtttcatattggtcctggcaatttttaaaaattactataaaaaacgaaggcaacaaaagcatgtatcagcaagtggacaggagtacatcaaagttaaaaatcacatgatatatcttaagttttattgtattatataaggtcaattgtatattagagtgtattattattttttaaattaattaaaaaaattaatataaaaaagaaacaagctaaaacctcctaaccctaccttgtagtcatgaactgatgtagtatttgaaaaatataacatagttttaaaaatttaagttgaatttaatggaggggaaaaatgacatgaaatgtaaatgattagtgaacttgagacttgatcctaagaggctttaaaatcataaatatttgatcctaacagccgtccagtatgaaataagattacgaaaatctttaaagactgtggacataagaaaatagtaaggctgatctgatggtagaacatctttattgcagaataatttattgaggtgaaattttctttaaacagtttctcctcattctgacctcctcccagtacctggtatccatcatcaatttgtacttctctgaggatttatctattttgattttcacttcagtggaattgtgtatagtatgtgatctttaatgtctgacttctttcacctggcatactgttttcaagttccatccatgtttcagcttgtgtcagctatatatcagtattttatgcattttcacagctgagtcatagtccattgtatttataatatactcggattccctggtggctcagacgggaaagactctgcctgcagtgcaggagattcaggttgagtcctggggttgggaagatccccgggagaagggaatggcaccccactccaggattcttgcctggagaattccatggacagaggagcctcaaaggatttggttctactttttggctttgagaaaagtgccgcaagaatttatgtgcacgtgttcatatttgagcccctgttttcagttctattaggtctatacctaggagtataattgcttggtgatggtgtaattctctattcacttttctgaggaatcaccaaattgttaacacaggggctgccacggatcatagtcccaccagcaatgtatgagggctccagtttctccacgtgtggttgacacaggttattttccattttatttgaaaattagaatatgatactgataaatgactttcagcaaaataacactgtaaagaaatgatttatctccattatttcttatacagtgattatacatcagttcagagtatctcttaattctacttcctgtcccggattaactgaccagtagaaattgttttccaggagaacaaatttctactgttcttcattttctcaaaatcatactatattttgcttcatatttctactgtgtctctctttttttattctgcttgtgtgtatagttctttgtttttaacagactttctaattaccattccttctgcttaatgctcagaggaagtcagtctgtgtgtctctatttatgggtaacaccacagttgtacttttaggctttaaaatgcatgattttaaatcataaaataactctttttgtaaggttacctactctcttgctgaagaaataacgtcacttaacctggaccttctcttttgatatggaccagaatttccttggcctttagttgatgtattgttctcagatttctttttattatattcctgggttagtactcatgtttgttgtgtcctgttattacaattgaaacaaatcctcataaagttaaatgataaaagataaattttctgaattatgcatattagaaactgggtttgttttttttttggttctcacatttgattgacagttttgctgggtatacgtttctaaatataaaataattttcctcagaacgttgaagactttgctcagtttgtttctaacatccattattcttcctgaaaatatgaacccagtctactcattgaaaagttttctaagagatatcacagtgaaaatgaaacagaaaaattgttaatgattttgctttttagagtacagaggttgataagtaagataatgaaaatatgtagctggttaggtagtggggctgtgaaggaaaacagagcaagaggaggaggatagagagttaatcttacagggagactggtgtaaattaaattacatgggacggccagggagtgcctcccttggaaggcgacactggtgccgcttcagtaaagacgaggaaggaagcggggtgtgcagagctgcaacggctctgatgtaggagtgttgctgatgtgtccaagagtcaaccgagtggctggcgtgactgcggcaacttgagggatcggttcagtccagtcgctcagtcgtgtccgactctttgcgaccccatgaaccgcagcacgccaggcctccctgtccatcaccagctcccggagttcactcagactcatgtccattgagtcggtgatgccatctagccatctcatcctctgtcgtccccttctcctcctgccctcaatcagagtcttttcaaatgagtcagctctttgcatgaggtggccaaaggattggagtttcagcttcagcatcagtccttccaatgaacacccaggactgatctcctttaggatgtactgattggatctccttgtagtccaaggggctctcaagagtcttctccaacaccacagttcaaaagcatcaattcttcagtgctcagctttctttatggaggccagcactccaggcctcccagtccatcaccaactccttgagcttactcaaactaatgtccattgagtcagtgatgccatccaaccatctcgttctctgttgtctccttctcctccctctttcaatctttcccagcatcagggtcttttcagatgagtcagttcttcgtatcaggtggccaaagtattagagtttccacgtcagtccttccagtgaatattcaggacttatttcctttaggatggcaagtgtcttttactttcatggctgcagtcaccatctgcagtgattttggagctccccaaaactaaatgtcactgtttccattatttcccatctgtttgccatgaattgatgggaccggatgccatgatcttagttttctgaatgttgcctagtagggatcaaaggagagcggtgactgggagtgtaggcctttagagatacatacttggcttttatactgaatgatattggaagctattggaaagtaagtatcaacatctgatttatagtgtaaaggaattatatgcttccaggttgagaagcagctgtaacgggagcaggggcaggagcagacggtccgtgtagaaggttggaagtgagagagcactgtggtttgaacaacaggacttaccgatggattggatttgagttatggcttttgagatttgagatatgaagaatggcttcaattgtgtctttggtctgaataagagtttaatttaatgatgagggagtaggttatgagagaagcatacttgggagagaaggtcaggcgattggttctggaaatgctaacttgaagatgtttattatacattcaagtggagaggtccaggagacagatcctgtcctagagttcaggggaaaaatgaaaaaaacaaaaaaaacaccaccaccctagaagccatcagctgtagatggtatctttaaaggtctaatgttgatgcaatctggtagatacagctagagatggttgaaggcctccaccttggggcaccttaaatgaagctgttggaggagaggaattagtgcaggaggccagggacgagaaacagtgaggtacgaggaagacgctggctttcggagtaccttgacagccaaggaagcccagtgatgcgaatgtatcagggaagtggggtgactgtcagtgacaagcggtgctgaagtgtggccacatgtggactgtgaattgattgttggagtcatcaatgggaggagagcggtgactttgagaagggcagttccagtggaggacaggagtcttcctggagtgggttcaaagtgtaggggttttaaatacaagatgcagtggggtcagggtgaagtggggtcaaggtggagtggggtcaaggtggatggagcgggttcagggttgactgggaggagaaacatgactggcggcttaagagggatgctgatcaagagaggattttttattttagtagaagagaagcagcatgcatcagtattgagaatgccctagagaggaatgaactggtgatacaggaaatagtagagaattgctgaagcaaggtagacatgtggagagattagcctttgataagcgcatgggtggtttatcctcagtagcaggaaggaaggaagcatacacaggcacagatccctctgtgaaaatctttgttggagctttgtgttacttctggatagtcacgtaccacaagcatcaaggctcatcctggctagctgccttccacttctgggtagtcacacttcagaagcatcatggctcaccatggctagctgccttccacttctttaggcttctccttttcagcttaaccccttcatggtttttattttggcaatgtaaatcaatggtggtttccagtttaggaattttgtgtttttaaaaatattatgttactgtaacaaagacatacaacacggatttatgagtgattcacatcttgaaacttttgagaatcctcatatgtgcagatatttctggggtatgttccagagaactaccagttacattaagatcagaagcggaactgctttctcacaccagccgtaggcagcttgtggttcaaattcacttaccaggaaaattataagttacttcatgttttggattgcttgaacacaggtgaaatcatgaatgcaaacatctgttaatgtcagaagtctgttttgttccttatgactcatatctcttccagtcacctcagcccaggtcgagaaatatgggatacagtgatagctttagagttccagcattttttacttgctaaaatgtgatctctgggatcactctcatttgtttctgaaatagaataatgttgctcttcctacttattcttttttttaaattaatattcatatttatttatttggcactgggtcttagttgaggcatgtgggatctagttctctggcaaggatcagatccacagcccctgctttcggggcttggactcttagccactgaactaccagaaagccctgccgccctcctcattcttgctcgggagcccggttcttaatagcagtgatacttccgctctggctgtagggcctgctcacgctgtcttggggcatggttcccgcagcttgcttgctgtgttccagcgcagtggcacttatgttagggagggtaacggctgggaagggcagcagagttatagctggcccttcagcaaggcaggttggaactgcacgggtccacctgcacatgggtttttttcaatagaaattagtaaataggagtacacagtccatgattggttgaattctcagatgcctagcagtattggatacagacagccaaccgtaaattatactcagattaacccctgaattattcaagggtcagttgcaattgtgagaccaaaaacctgactagccttttgcttacttttcctcacagcacttttagtgagtccctcttgggtttaaataactaatttccattctttacagaccctaccttttccaaaaacctggaacaagttccttggtcccttgaccagaagacattgtgagtggtctctcctttacacgcacacatctgcgtgtcttcctggggtgtgtgcgctgagagtcggtgggtctggttccccatcggtgtgctcggtgctctctgggagcacaggctactacaggagtgatggctggaaataaggggactccggcttctcacagctttactctcattccttctgaaggcagggtttatcttacagctttattctcattccttctgaaggcagggttatcttattgcatttcctgttaagcaaaaacgaaagttcacgctcatttttcgttgggatgtgcccacactgtatcgtggcctgacatgtgacatgtcagtgatatttgtgctttgtccacccagtgcttcataggctaatgcctctgaggagggtcttcagggagtgctcctttttgcagtgtgtcacagactgctccttcgctgtcttcttggctgagtccctgttaaatgactttattatttaacgttgtttcacttgccatctccttccttggatgtttcatgtacatttctctagtaggctgccgttttgtcatctgtgactttgcttctctgtttacgttgctgacttaaactggtggcagtgactttcccattataagtacaggtttgtttttaaaaaatcccagctatctcattctgacacacttgtgttcctttgcaaactattagtgaaggccattgcccaacctccaagtctatcctaatagtttttctaggttaagcaaaataattattgtctctgtgaggttttatgtttgtggcatattttgagtaacacttagggatggtttttcttcaatattttcatcacattaaaaaattttaagtgcagaagaagtttgggagtgtcaggaaaaaaggtgaaaggacagtgctctattcatcaactctaaaatgtcatcagcctttggagtagctgccgctaagttgctccagttgtgtccgactctgtgcgaccccatagacggtagcccaccaggctccctcgtccctgggattctccaggcaagaacactggagtgggttgccatttccttctccaatgtatgaaagtgaaaagtgaagttgttcagtcgctcagttggtgtccgactcttggcgaccccatgaactgcagcccaccaggctcctccgtccgtgggattttccaggcgagagtactggagtggggtgcctttgctttctccgcctttggagtagaatcaatttgaattcacctgttcatctgatcaataagtatttattgactgtttactctatggcaggtactcagctaacttttaaatatgtcattttataatgttcttttaaaatggatgatgtaaggagaatcaaattttctttttattttttttgtgaagatcattgtgaattagttttcagtgtacacatacatatcagcagacgtaactcactttttgataatggagaaactgccaactctagataaaaatgaaatgtggaaaatacagaatctgctttgctttctctgctccttattcagttttacaaagacacatgcaatgtgaactcagccagcactgtcacctgctcttcctgcggttctgctagtctctttggaaactggtggacttgaaaggagcatcatgaactggaaaggagaagtcagatgaacatataattcagttcagttcagctgagtcgctcagttgtgtctgactctttgcaaccccatggacggcagcacgccaggcctccctgtccatcaccaactcctggagttcactcaaactcacctccactgagtcggtgatggcatccaaccatctcatcctctgtcgtccccttctcatcctgccttcaatctttcccagcatcagggtcttttctaataagtcagttcttcgcatcaggtggccaaagtattggagtttcagaacatataattagacaaattgaaaatgggtcctttataattcagaagtgactatgtttctatattacatagaagtttgaagtttttattttagattattcctgtttaagaatactttgtagtctgtgaacagctgatccatttaaaggggatttttaaaattctttaatttataatgatttgaccattatgatacaaatattttattactgtgacaaaataaaatttctgttgttaaaagtatgttttaaaaattttacaaatttcttgagttacttaatttcttcagtatgtagggaatattgactgaagatattcttgaaagcctaaattacttggaatatatatgaaacctctcttatgtacttctgttcaaatgttacatatttttggatcatttacagtatagactttaagtttgaaattttacatttttagttttataaagtcttataaagactaaaaatatttttgttagtactattggaactaaaactaaataattttatccacataattgtccttcagctgtagctgtaaagaataaaatttcttgaaataagtagttatttttccatttgaaataaccatttaaaaatatttttcatctgtaacatgtattttagtttttataaatagcacagagaaattgaactagttatataactaaggttatcagctcaagttcagtagtatatttgatattattaggctgagggtatttcataattaaaaaaacaggttattattgcttttgtaagtacatgtgcttttgttatatcttgtgtgctaatctaatttcttgttgaagtcactgattaaaagggaattgtgaaccatgaggttctgaaacattgacgtgattttaatctgataacaaatgggtttaagttcatgtactttcagttgttggcaacaaatctaacctgtattttttggatttatgaggataagtcctgctttggcaatcttgtagatcctcaggagaatagttaaacagtgattaatcattgtttcttcactgagtgtgcagaaaagaatggaaaagctgcatttcacacttctgaagcaattaatccccatgatcttagccaggtttgtcttgtagataagtcgggatacgaaacgctgcctaatttatcaatgtatgcctgccataaagtataaaacacacaatttatttcatatcatttatagtcaaatgtaaaaaaagagtgactttgccatctccaagagtgtttcctgcattacctccatataaactaagcaccggagattacaatggggctcctgtttattgtgcacagctgctgcagtcactatgcattttctcattcacttgctggcatttttagtgattgtggcataaatcaccttgctaatcagaaacataagtgacgggaagtcatctcctttttttgaacaatgggaaaaaacatatggcttcttcgacaggacttggctgttatactatttatgtggcattatattctgtatttagaatttcatattaattgcatggtttgattgaaggtgttgaacacccggggcttgtggtcaaagtatttattttgtatccattttcataacaagtaaacaaaatagggtaaaattatatgccttgtattaattttttaataaaagctactttgtgaacagttttaagattaagacaaattgaagaaaatgtatatatttgaaaatgtgtgaatgtttctatagatgcatagatacagtaattacaagttagtttttaattctacctgtttcaaatcactgcatagagtaaaaagttactgtcctttaagtactaaactataattgacagtagtttgcttttctgcgagtactatcatttcaggatgggttgcattttatgattaactgctgttcattagttaggacatacactgtatatgctgcagctgaagatgcatggctgaaaggagtttctgcgtgcactgcaggctttacaggatgccctaggtggatttggtgctgcgtgttacagaatgctcactctagattcggaggtttccctgtttccctccgtaggtaacttaattctcaaaaggcattgagtacaacggcctttcacactaacctgactttataatcctttacctttctagcccttctcagcatccgttttcttactggtgggtggcaggagaagacttattttgaatgtgtgaatttcaaagggaattttatttgttgagaactttaagtcttttaaaggttgttctctatattacatttgcctataaattagtgaggtcagttttaaataagtgtatcatagcctgtttatttaaatgtgtgttattccctttgaaatagtccccttgggaagatgtatacatgatccattaatcaaagtattttagcagtgcctcttttcagattcagtggaattgatgtatagctgcccaaaatggatattttgaagggagataagactcattttgtgtatgtatgtgctagtatttttgtttaaaatcaatcaatcaatcataatggcttgtattgcagtctgtatatatctgtagataattggacgctctgaatagaaatagagttttaaaaaactgcctgaattttaaataaatgatcatatttatccattttgttttagaagtcttttatattattgtctcaacgaccacctgcagtaggagcccacaaactgagtaaacacaacataaggagagggtgttttcccccatgttgtcctggcttatttcaaaaatgtcaccatccagattctcttagagaatagtgtactgttatttaaaatatatttataacagaattgaggctagattaaaattatccagtgcttaaaattacctgaaatctataatctacaatagtgcttcaatccttgttcatttttattttctttattcttttaaaacctcttcccctccctccctcaaatatctttttttaaaagattgagttgtatttgttgtaaagattaatttttaaagtcataaaaattaaaacgtgtgtgtgtatatgtgtgtgtgtgtgtgtgtgtgtatacacgcatactttttctttaccataatataaatattctaggaggattggttgtcaaaatccaaaaaaaaatgcaatttatgagatggctaaaagtatcaaaatagattagaaaaataaggagctctatttttagtggctgaacactttgggatttgttagtaatggagctttcaggaaatttttctttcatggaatgcttgtggtaagaaatatataatcataaattatttgcttattcatcatgtttataaagccaagggtttaatttctaagtgtatatcaatttttgaatgaaattgaactatcggtaatatttatattcattaaacattttctttaaaagtttgttttttgttttcagagaatttgcattatttttctcctagttagttctttgtcttacttacatttcttactttgttggtccctattactctctaatgtagagtctgaatccagtgtggaacttgccagaagagttcttgttcttcccttgtgttctcgtggcatgaagaagggaccctctctttgcagggaagggcttctggtgtccccaggcaggcgggttcctgctcgcaggcctctctctggccattgtctcccccctggtgttgctctgggagcgcctttggaatcccaaccaatgggaggcccaccactgcccgacactgtgaggcaggcgacaggaagctgccggcctaatcatactagagttcagattcagaggttaatttgtgaaggaattccccaaaagggaggctttcatttgtcagcagtaaagctgctttgagtgacacattatttaggagttttaatggagagtttttaatggaatatattaagtatgagaagcatggagcacgaaaaggcattgcatgtttcgaaagctgcgtgtttttagtgtttaagactccttctgagtagcatgtccttggtgtgggctttgcttgtgctccttgaaggagttcagccacatctttgctgtgtaggaacaaagtggaatattttctaaaaagaaaaggagtaaagagccagacgtggcgatgccgtctcagctgctgagaaggaacgtttcggagttcggcaggggtctgttctgctctctggtattgacctttccggcctggtgtcagtggagctggaagaatacttgagctgtgagaagacgacgtttagaaagagcaggagaataaggagaagtatcatgagatgcctggggacaagtggcacagcacgtgtgcgctctgaactgagagcccagtggaaggagtgctttcccctgccagtgtcccgagtgcggtgtgcacacgctctgctgtgctggccgtgccaggagggcgggggctccctgggcgacagccatgctgcccgcgacagcggccctcctagagccgcggggaggcgggctgcagaggctggggcctgtgggggacaggcgccccccgtgatcagcagggcagagcgacctcagcacctgggcagggaaaccagaaccagcgcctcagaggccccccccccaagaggcacagagggggtgactggtggatgtgtccagggaggtgaccgtcagctgactgatctcgcttgtgaacacacgtgaaactcaacaggactcccagaaatgttggagaaacagtttgcaggggcctggcctcctggcctgtgggttgtattagtcagagttctccagagaaacagaacccaaaggatctacatttataaaagagggcaatcagctcatgcagcataggagctaagaagtcccctcctctgctgtttgcaagctgaagaaccaggaacgtctgctgtatgtgattcatgatgtgtccgaaggcctgagagttggggtgatggcatgggggatggaggaagggactgaatccagatctgagtccaaatacctctacgttagctcagagcacgaatttgcccttcttcaccttctggctctgttcaggccttggatgtgttgggtgatgcccattcatgttggcatcctcactcagtccagttcaaatgctggtctttcacggagaagctcacacagacacactcagagtgatgtcttgctagctgccttgatatgccttagcccagtcatgttgacatataaaattaaccatcacaggagggaagatgaaaaccagcaagtgtgaattacatttcttttgtaaaataattcacaggtttattgaggtactaagaatcttttctttcttcctttttttggaaagatttctgtccagaaaaactttggcttatgtacttattactgcaaacagtattctaggatcaacaagttaaaatatgattctttcttctaggaactggcagtttatagaagggagtggcattaaaaaaaattaacatctagtgagatgaatgaaatgatagagtcgtggatgaaagattgtagactacaggaaaaaaatacttaaagcagcttggaggtgggactgtgggctggttccatggaggcttccagagaaggtacagactgagctctgtgtgaggcatgtgaagatacacgcttcaggaggagggaagcgctgcctgcggtggcccagggatgattacaaagctaaggtgtatttggggagctacacatagttcaggttcacctgttgggtaatgttgacatctgagattgtagacataaaatctagtgttttgaagagtcttgtggattaaacattaagaatatgggccttctgtcttggaggaaaaaagaaaagaccaggggagacaggtggggtagaaagaacctcagattgcagtgttaggcattgtgacttactgaaggaatttaaggcagagagtggtgtggtcagatttgaattttagagcccttaagtgacatttaagcatttgagtgattggagggagaactcaagagtcagactactagttaggagactgttgcagttggtcagggaagatttgagacagcagtaagggagtcaggagtaaatcagagtggtgagtgagtgagaagaaggggctaatataggaggtagaattgtctgggatttaaccggtctgaggtgagggagtcaagacgaaaatacaggtacttggctgtatcttggtgtcttccatagatgatgagcccaagaggaacattttgaaggggaacaggatgacctctgtttgggcgtattgttgattaaagtctgaaaggatggaacaggtttggggccaagactagtggaggggttcatttttacaggaggagggtgagtttttctagctgataatagtaggaatagtaaagtagtgcctgtggcagttcagaagccgacgctgagatggatatggaagttttgagaaatttactggagggagactttgggaggtcagggggagaggggtcaggagtgaggtgggaaagcttcagaccacagtgcacatgtgatgtctgtgatgagagaagaggacggaaagcaggccggggaagagtcagataccagtgccctttggggacgtcccagcccccctggtggcgagggcggcgggtggggggagagcccgcgctgcctgactgcggtgggtgcccggcgctctgcagcggtgggtgcccggcgctctgcagcggtgggccctctctctgcgggggcgagcgccctgctggagcctgcaggcgggaccacgggaggcgccccttccagcaggtcgtctcagggtacccctcccgacgactgctgtgcctcagttggctgaagggtggaggggcttcctgttggttcattgtgtcctctgctctcagcacgtggagccagaaatcagagaaggtggctgagcctgagctagtgtcggaggcttttcaagaactgatagacgcggggcgagagaggacacagtactgggaagacctcagatagtctagttcggtctgataggggaggaagggacactggaaagggcggagggggttgaagtcaaaggactcactttcattgagtttgaaagcacttgttctgattgagggactaagggagcttcaggatagagaggactgtggagataaagtggtgtattcatttagatgaatagccaaacttcaggaaatacacataaaacacataaattccatcatgtgaattgagagtgaaattttaaccaacaaaaaacaaatgacagttatcatcatgtgatcacattgtagaatgtgtgcatcgtagaatcacacaccatgcataggcatgaaagcatcataaatacttagctttaatagtcttaacttttctgcaaagtaaagttccaaagccacttgtcaagtgtcttaattaaagctcactgtttattttccctgaagaacttggttttctgtgagttttttcagtttatctagtaaccttaatatttcaatgtctttttcttttttttttttttttttgcaaaagaggaaaattgagttctctcttaaagggtttgtgtctttatactccataggaaattgagaagtgaaaaaacgttcaaagcacatatagctaaacatttcttgaactgaaagaagtgaagataaggtaacagttttgaatacatacaaacaacttttcagtagctgtccctttgcagaagggaatcaagagtggcaaccagtaattgaagtaattaaaatactgcagtatgatgaattgacagaatgatggacagaaaaatggactttgtgctaaagcaaatatactaaaatgaactgaagattgtaggtgggtgttcatcttttctgtatatttggaagtatttgtataagatgttgaaaaagtagtatcatagcatctgcaactttgaaatgcttaagaaagtgatggtctgatggcttgataaataaattataaaaccactaaaacatcagttattagaatctaggtggtgagtatatgaatggtgactgtaacattcttgcagactttgctgaatttcaaaaattttcagaagaacatgttggaggaagagtgccacaaacagaacactgactggccttaacgactggctctcggagctcgagccgcgcggcccgaggcaggagcggggggagtccccacaacgcgctgctttcagaggcttggcttgcgtctgctctgcagtttcgtctcaagcgactggcaaacggtagccatttggaaaagcctctgatggttctagactgagaaactccacatttagatgtcctcttggttttgggttaatgtgtttagaatttctgcacgtatgggcattgaattatttgatggaacagggatgagatgagaggtcaaggtgcaaatgttgataatgaggactgctcagtttcacacacactgtctgtgtcccatggtccagagcctgaatgtttcctgactcagtctcccagctaatcagagcctgagctcggatctcctgatgggatcttagaaccgtctttatgcaaaggatagaatttctgactttgtagtacttatcaaggaaaacttgacggcctttaaaaattcttgcattttgtaaattgcataagttcttcaaaggggatttactgtattcctatcttaattagtagttccatctaaatatatgtataccatacatcagtgtgaagttttgtgaattatgttaattttaatgtagaatatatagtaagaatatgtagtaagtgtaaatcactttttactgctaaatatatatttttatgcatattgatataaatatttactacttactattcagtagtaccttccccattgatgactttcttttcctttttttgtcttatgaaagtcagtcattttttgatttctttataagaaataaacttagggttctggcctgtttgaactttggcctcaagtgcatttataaagtacaatctcttgtttttttaacttgctctgtttcatatgcagggtagataaaaattactgaactttttatatttatgtaaatttatttaaaattgaattcaaatttactaccatatgcctcaaaggctaaacataatatagactattataatcatttatataaattggttttaaaaaccagttcaatatgttgaatcaatatgtcatgaatttcatatctatatagttgtcatcagtaaattcatggcatgtacttttacagcatacagatcttaaataaaattgaatagacttttctagcctacattatggaataacttctgttttcttccagttgactgatttagtattagacaagaaccatgctatgctttgtatatccatcaaatcactttttaggcaagtctttctctctcagtaatacttactggttgtctttcacttgctggtctctgtgtgatgcaggataacgtgggaacactcacttcagggggttgttggaagagcgctgtgcttttctttctgagggtgtgcgagtctgtggcctccccatcatgaagcttgagggaaatggcagcacctctgagtgcgtgttcatctgtgggtttagttgtgtgttctgtccatgctgagagtatattcactgacctgtttttagagcgaatatttgatttttttcccatgtataaaatttatagaaactttgttctttaaaacatgtatgtatacactattttattaatttttgaagtatagttgatttacagtgtgatgttagtttcaggtatacaacatagtaattggattatagattatactccatacaaacgtagtgtaaaatattgactatatctccatgctgtacattacatctttataacaaatctgtttattttttgaaattaaaaaagtatcttcatattcacatagttaggcatcactaatatactctagggttcaaatgttctgtaattcacatgagtaaaaatttccgcactagtacagtattggcaacttttggaaaggatatacgtaaggaaatattggtctacaaaaacaagcagacttactcttgagcaaaccctagaataagagtgatgagttataaaatagtaaatatatttcctgttgtcaaagtgggcttcccagtggtaaagaatctacctgccagggcaggagacacgggttcaatccctgtgttgagaaggtccctggaggacgaaatggcacccgactccagcgttcttgcctggaagatccatggacggggagcctcgtgggctgtagtccatggggtcgcaaagagtcagacatgacttagagaccaggcatacattgtcagggtagaagaggaagctgtttttttttcttaaatgcagatcttttatgattaaatttatatcacttaaattctggtgaaaatttcaagtgtaggaaatttcatgggagcaggcgttacatacctttcgttggccttgaatgttaagcagagcattatattactatttctgtgtaattataaaaataaagtaattttaatgtaacctagaagttaactgctatttaatgcttaacaaagacatatttaatgacagtgttttcttttcataaccaacctgtgttaatatatttgacctgccattttttatgtttatgaagaattagaataacttatttttaaaaagagtgatatataccctttttagggatgtgtcattttctctgtttgctcagtagaaaatgacaatttagtatatttcttatattcttatagaatttattttcttaaacagatgcttgttaaggtcatttttctgaatcttttcttcatgattaaaaattagtgaaacatgtaaaaaaaaaggttcatgtttaagtggtcatcttcctaaatgctccctcgaacattattaccgaagtctcctatagtctatgaagggaacagataggaagaaaagaattagtatcctgtcttaattcgttgttttgatccagtaggtcagggtctttaattaattttgtgttatcctagaattttatacctggatcctttttgtccttctggccttttttttttacttttgtgtggtttttgccttatcaaatataggtatattttgtttatttagaccaatttctaattgtcttcgagaagcattgaaagctgaagactcgaagtaatttattttcagtgtgtgtatttactgctgtgctgtatatacattttatatttatgtcaggaaagggttgcagaggggtgctttggaaccacctttccagctctgaatagctattgtgtacatatggtaaggtactgctgcttaacaattagtaactgctttgatgaaactaaattacatgtttaagctcccatcaggaagtcgcttcacatatctgtattaatgtattcaaggctcgagaaggaaagttaattttccagcttaaatatttaattcaagcttaaaatttagtctgtaattagagctcccaaatggcaggaacatggagtatttgtccattttaattagattgttgtttacctattaattatatatcatatcttgtcatatagttttgatggtaacagatggtgctaggagttagtaagggtttgaacaaaataagattccacatgatttattaagttgcactttattagtgagtggtctgctttagtcagggtattctcccaaataagaactgtgcaacatttcactaattttgatagttattcttttgtagaaatgttgaagattaagtctgagacagtgatgtctgtttagaaacaaagtggattatttcaggattctttctttttaaggagtatgtattgtcagttctacaattggtatgaggtttggtgcattttgctaagatagcatcagggaatcagaattttatttattggtaaaaatgtcgatgtagggaatgtttgtatatatgataatggtttaaggtctgagaaataatagggtgatgattcacttatttatttcaaagacattgattctctgcctattgaattttttaacaggaagacaagatattttgtttaccaaaatatctaagagcagactctggtgcctagtgaagttgacttgccagatttccatattcaaaaagttactgtcaactaaatagaatggccttctaagtctgcttatagaagattttattaatttctgtgttagtaattcagcttcctaaaatgaattacttacacaaatgcacatatgcaaacatgtatagagagagacagaaaaacccagagtggagagggacaaggggagaaggaagagagggttaagagtttaattttttaatcttatatagtctgtttgaaatctattctcatccttaatatcattaacttaaaagtacatttggttgccatttcttccggttctgaggccgtaaaccttggtcagtgttttacagcaaaaattaggtggtaggcccagccccgcttctgcttgcagtgctcactctggaggggcctcctgctatttatcaggtctccaacagtatggccttctgctacccatgctaccttcagaaagcagcagtgtttgggtttgttttatttcatttttatatcttggtttgtctccacttaaaccctgccaatttttagaaatgtcttttggtgtcgtaactaattcgtcatgatggggccgtgttttaatgctgagtgtacgattccacatgtaactgtagactgttacagatctgtgatacaggactctttaattgtatgaaatggccatgtaactggaatgagcactgtaatgggcttttccccctagaatgttgatgcttaaaacctaatctcagattttgtgctataatgtcacaatgtaggaaggatgctgtgttagcatttatagtaattaaagagaatatcaaaggggaaaattgttatttagaatacatatagctgtagtttgaaagtttgaattttagcatttctattccttgtgaaactgtggtattatatatttttttagcaaaatttatcagatgtaacacgggcatacttccacacaaaatagaaaactaaattgaaatgtataagtgaaattaaaataattgctaattaattttaaatgaaggaaaagacagttatattttataaaggaatgagatgataacttgatttctttgtttctaaagcatatgaaatatacaaaagatacattttgttttatctggagaaatagtgaatgaatgaacaaataaatggtgagttttaacagaaatagtgtgtgaaaacagaaatgctgttttattttagcaaagagattttcttttgggttttttattttcgcccaacccttcactaccactttatcccttgggaagacctttatttcagtcaccaaccatgtacatatataacttttccaaagaaaatggcaatactgatgctttttctggcattactaagattctttctttctttccttaaaagagcagtatatgaatactagcaaaatgtggctgttgataaatcagtcttattccttgatactgatgtaaacctcattggatttttggactctttattttcttttttttttcaatcaatagtagggtatcactatgcagtgtgataggttcaaagttaaaacaatgtgtaagaagggtgttcaagagttaagaactcatgaattgacgtatggacgctaatttttttttttaagtacagagcttaaaaaaaaaaaaaagagcattgtcctgtgctgagtgcttcagacagagaagcagatttgatgaggtgcttgtcactgatggtggggcacccacggcgagcccagaagcctggtgaggagaatgggtagatgaagacgtgaaggttgttagaagcactcaggcttctcaagcattcccctacactgctctgcttttgctttgtttcttttgaacaagatgaccttgactggaactcctacctaatgttgcttcaagattcagttcaaattgtctttcttctatcaaataccttaatttactcttttcttggcactttgtttatactcttgtcatgttgaattaaaaacatttgtttacatttctgtgttctttactgtcagctcttgtggcatgagggcagtatctgacttatatttttgcctctactgtttttagcacagtgaggggtcataataaactctggtggaaggaatgaataaaagcatttcatgtcatagggtgtggctgtagtaagagttagaatgctgtggatctatgtgggcgcttgtgaattttttttgacttttaaataactttattttttttaaataaattgtctgggaggtctgttttattcatttttttccccatcctctccccccaagataaatgatttttagtttttgctgacatgtaagcgctccatgtttttggtaaagatattgtagttaagcaacatggaagtgtgtacagtttaaaactacttataattctttccccagagatggccattttttcttgtttgtatgttcttctggattaccctccttccatttttaatacctttctgtctttctccttttattttcctttaaaaattttatctatctaagccctttaaaggtgcttttgaaatataggttcatcattggaattcttctcagactgcagaatgttctttgataatcgcagcagacattttcagtacttcgggttggacttttctccgtttttgaaatttgttttgcccttgcttctgtgatacggcacattcctggttgtttcttgattgattaccatatctctttgagctgcttttcctctgcctggattttaagtgtttgcatttctcaagatccggtgcttttctccatcactacacattcctcttggcagtatcatctgtccagaacttcgggaagcaacttcatgtgactctcgagttgacagctccagctgagaggactgttgacctccacgtccacttacctcactgtgtacgtttactatgtacgtgatgtttctgtacttaagctttcatggtagttcttcagattcagcagatctacaattaaagtattctgttctggcttcatctggtcttcttgtagttttcctggtgtcagtaagtaatatctttctttgcagttgtgcaaccagaaaactcctaattataatattcaacccatcaacaagtgcccctgggtcatattctaaattttaatatagctatgggtctattctggaattgactttgatctgttatctgtttgtccctccttacacagaccttacactttcagatagcatggctcagctgtggcttcttcatcttgcaaagctgtctccttcattgtacgctgcttaaataggccctgggtgtgctcaggcagttaagggctcagcacgtctgttaagtctgccaccttctgccttcacagtccctttggagtatctgttagaactgtattagaggcaccggtgactttgaggagaatttatatcttcccagtaacaagtcttctcatccaggagcatgtgcatcttggtttaatcaaacgccgtttcaaacaggccacacgttttctccatcaggattgttcacagtgcatgaaagttgccgttgctgttgtactaggatagttcctttattttctttgtggttcatctagtgttcagcatagtccctggcacttcactttaatacttactgaatttcaagcagttttggatatattttttaagtttgtagttttaagcattttataaattaaaaacacttttaacttatgtttttgtagataaatgacagttgtaaattatagttttttcttccttttaaattttatacttcttgttttatttatttaacctattggggtagctaaaatctccttaacaatgttgaacaaaatagccaatatcttgactgtctattaagagaaatgtatttatgttttaccattatatctgctatttgtgtttcttttccaccctaacaaatgctctattaaagaatggaaggtggtgggttttttttcccttaggttattttttaattaggaatgagtattaaattttatcaaaggtttgctacatttaatgaagtgatattatgatcttttcttctatagcttacttagaaaatctattaactgatcatataatattaaattgcccttgcatttctggaaaggacctgtattggtcacgatatactgtgagctcattcattcttgtgctctctttgtcacgtttgctgttacaaagtcatgctaacataaaataacttgggacatctccctttcttacaggttatttatagtaggaactattaactactttcagttcagtttagtcatgtccagctgtttgcagtactatggactgcagtatgccaggctgccctgtctatcaccatctcccagaccttgctcaaactcacgtccatcaagtcggtgatgtcatccaaccatctcatcctctgtcgtccccttctcctccctccttcaatcttacccaggatcagggtcttttccagtgagtcagttcttcatatcaggtggccaaagtattgcagcttcagcttcagcatcagttcttccaatgaatactcaggactgatatcctttagaatggactggttggatctccttgtagtccgagggactctcaagagtcttctccaacaccacaattcaaaagcatcaattctttgacactcagctttctttatggtccaactatcgcatctgtatatgactactggaaaaaccatagcttttactagacaaacatttgtctgtaaagtaatgtctctgctttttaatatgctgtccaggttggtcatagcttttcatccaagaagcaagcatcttctaattttatagttgcagtccccacctgcagtgactttggagcctaagaaaatcaagtcagccactgtttccactgtttccccatttatttgccatgaagagatgggaccagataccatgaacttaggttttttttttaaatttattcattttttaactaaaggataattgctttacagaatgtggtcttagttttttgaatgttgagttttaagccaacttttgcactctcctctttcactttcatcaagaggctgtttagttcctctttgttttctgccataaggatggtgtcgtatgcatatctgaggttattaatatttctcccagcaatcttgattctagcttgtgtttcatctagtccagcattttatttgatgtactctgcatgtaagttaaataagaaaggtgacagtatacagccttgacatactcctttcccaatttagaaccagcctgttgttccatatctggttctaactgttgcttcttgacctgcgtacagatttctcaggaggcaggtcaggtggtctggtattcccatctctttcagaattttccacagtttgatccacacagtcaaaagcttgagcatagtcaatgaagcatatattttactggaattctcctgctttttctatgatccagcagatgtttgcaatttgatctctggttcctctttcttttctaaatacagcttgaacatctggaagttcatggttcatgtattgttgaagcctggcttggagaattttgagcattacattgatagcatgtgctgctgctgctgctgctactaagttgctttagtcatgtcttgctggggtccagccctggtggatccaggatgattcgaaggggagacggataggcgaggaaaacttatgtatttagagatataagattagattaggaaaaatagtatagtaggaaatttaggtggagaaaaagatgctgaataacttggtttatggggaaaatcaataaaacctcgagacaagaggtttgcaccatctatgttaggccaccggcgcccacttgaatatcgaagggtgccccgccttaggctcccttttgcgggggacttagcagctagggcgagtaagtagacctggtgagcctccccgctccagatgggaattcagctgaaaaaggggagaagagaatgacatagggaagcccagcatcggtgcaagactccaaaaatcttatttttcaaaatcagcttatataccccaagttgtacataaagaaataatggaatatgcagagttatgcaggggcagcagtcctgaccctcattgagacaaacaaggctttctttttgcataccctcccgtatacaaaaggtctcaggtggtttacattatcttctggccaaaaggcctgttaacatttttatggctctcttcctggataattgtctatcaaccagaaaactccttttccctagaagtgttttttctttactctgcatcaccctcaaagtactaaataaagttacattcctgtagaacaaaggtgcagtgggttataacaaagaaagtacttaactcaaagatctaatgttgctaataccaggtctactacctgtttttctatataccaactatctctacaaataaaagatatgaaaatttggcagcaagtattggctcaacaaatgaaacctttaatcagtcctattgtgatgattttgactcctcgaaagtccctacattcctaggatgttttaagcttcctgtgcctcccgcggtcaggaggcctcaaacaatcacatgtgcagctgtacgagtccagcaggcaggctagaaagccatcagaggggtttttggattgaaacactcatattatgcccaggagatttattatctaaaagctctaaattaatttttttttccagaaaaaggttgaggggggacagctccctgttaatgtcagacgagtaggtggaaagcataacacagtaaagcaggcagactctggttttggggggtggatgctcaggaaattaacccctgaagcctgatcacgtccttgcattttgtcaggcttccttcctcatgaccttgtcatgggtgggatttctcacgctggctcccggcagtgtctgactctgtgtgaccccagagatggcagcccaccaggctcccctgtccctgggactctctagtcaagaacaccggagttggttgccatttccttctccagtgcatgaaaatgaaaagtgaaagtaaagttgctcagttgtgtccaaccttcgtgaccccatggactgcagcccacaaggctcctccgtccatgggattttccagcaagagtactggagtgggttgctgccgggagccagcgtggagaatcccacccatggcaaaggtcatgaggaagaggcctgacagggcaaaggtgagatcaggcctcaggtgaccctccctggactttctcgagcatttaccccaaaaccagagtctgtctgctttattgtattatgcctgtcaccaactcttccgacattatcagggggctatcccccgtcacctttctctggaaaaagttaacttagagctccagttaataagtctcctgggcataacaagagtgtttcagtccaaaaactcctctgatggctctctagcctgcctgacaagtttatccagactctcagttcacccttcgattaccctggatccaaccagggctggaccccggcaggttgccatttccttctccagatagcgtgtgagatgagtgcaattgtgtggtagcttgaacattctttcgcattgcctttctttgtgattggatgaaaactgaccctttccagtctgtgaccactgctgggttttccaaatctgctggcatattgagtgcaacactttcacagcatcatcttttaggatttgaaatagctttaagggttgttaaaatttacccatagtgcctttggttgggagtgagagatgttgtgatattaaaggaaatcttttactacatttccaattatcttctaaaattttgggttgtcttcagtttctttatagcacagttcagagtgtgggtttaaaaaactatccatttcatcatcgttcttttaattttatttggatcttcacattttggggcacaaagttgtagatagtactccttttaacccctgtatttaaaaaaaaagtcctatttggatatggtgttatgtcctttttcccctttctaagaaaaaagttaaggatttatttttttttgctttagttaatttgttcttaacctttccattgtaaaatggaatcctgctgaagaaaactatagaaagaaatgtatatattagtgagctattataagagaaacatggttgtagtgatcacccaggtcaagaagggggtctttgccaacctctgcagaagcctgtccatgtgttttaagcatccttttctctcccaaattagccacttttctgacttattctgaagagtaataagttatttaattttcacccacgtattcctgtccaggcacaacagtttggtgttgcctatttttttaaaaacctgtctttgcctttaagtctttcttagcctgtagttcctccttccaatattttcttttctgtacaaatgatcttctgaagaatctgggctgtttgacccatagagttctcatggtccaagtaaacattctgttctgtattttcttcaggttggcaggtaccaccagaacttgactggatttaggcttaatttcttaggcaagattgtaggtgctatcgggttctttcatcagggggcaggtaacacctctctgtgactttaactttggcagcactgatgtggaaagcctaatgtgttcactgattatttcatttgttattgaatgttttccttatgtaacccattgagaagtgaattttatttcaatttctggttatctaacaagtattttctgacattagaaaattctagatttgtttcatggtcaggatatgtgggctctacatttctgcaatgtattaagattacctttgtctctccttcttgggttttagcagacaagcatttcattttcaggcttcccttgtggctcaactggtaaagaatccaccagtaatgcgggagacctgagttcgacccctgggttgggaagatcccctggggagggaaaaggctacccactctagtattctggcctggagactcccacggactgtataacccatggggtcgcagagtcagacacgactgagcgactttcactccttccttatgcaaatttccaactgttctactggcatttgtaaacaacttttacttttcttttgctagtgatttaaacattttatattgaaatagtaaatcagattatttagtgtattcttcaaatggtctaggaaaggttctagtttctttttcaacaatgtgattaagagactgtgattctgcacatgactgagaacggggctgacgtaggtctggttcatggccacgtcttgtgtgccatccattcatgtccagcacacagaccaagaaaggcttatacgttttcaatgaaaaaaaacgataagtatattttgtggcacatgaacatttatttaaaatttaattttcagtgcctgtaaatagagctttactgaagtatagccatgctcattatttatagcaaaattgagtaagttaggaaagagactcatccacgaaacataagatcatacccgtgtggccctttgcagagtccgtctgctgacccgtagcagggagatgctccctttctccttatgctcctcattgacctttggcctggtgtccataaccaataatttgttataggactatgtaaaaaatccccaaatataactgcatgaactcagccttgcttgtgaccattaatttttgaccaccttgcagtcgatttcccttgcagtatatttccgtcttgtgtgtgtaaccgttgaaagctttaaaaggatgagcccatttgatattggtgctatgctacttgacgttgcttttcctcaatttcattcagtcagtcttagccattattaatattaaattgtaatgtaaggtggtaattttatattgtgcagtctgttaagtttgtgttttctgtagagtttcttattttccatgaaatcaaattgcaatttaaattaaataaacaaattgattgttaaaatcattctgaaagcaaatcctctgaggttttgggaacatgattttaattttattaaagattcactgttaagagttgactttccttatggataaagtcatgttcattgatttaaggtattttaaaacagaattttggcaaactaagggtttttgaaaaaaagtctaatcttgtaataattttttataggtagaagaatttggctgtgttaaaacaagacagcaggcccaaaatggagtcatttatgctaagccccatgtaaccaaactgagacaacatttagttttggctctcccagaaatgaaatcttaaactagtcagtcaagaatcacctactaagcactagacccttgctgtcccctaaagaagaatgtatatgtgtactcagttatgcccagctcttttgcgacccagtgggctgtagcgtgccaggcctctctgaccatgggatattccaggcaagaatactggaatgggttcccatttccttcttcaagggatccaggtatcttccaggggttgaacccacgtctcttccatctgcggcatcggctggcagattctttaccactactgacccgcctgggagtcccgagttgggatgatcttgccataaccagtcttcttctttgcctgatgaacctctttgttcctgctttcttctgcctataaaaatctctcatttttgtacacttccttggcattcctttctgtctgctaaatgggatggtgcccaactcatatttgttggataaaaccagtaagatctttaaaatttactcagttgaattttgctttttcatagctgttataaccatgtaaatgggttactctgattcacaagagaggagtttgtatcactagaatttctaacgtttttgtaacatagtttgctgggtaatcaggaagccatgacggacctttccttaagggtttaggatcactgtgttttactttggtacatggctgtgtctttctctgtatctgtgtcctgttttacttaaatttctaatatttatgcctgacaaattatttcatgtaaaatattaccttctaatgtttttaactttctatagcagttacttatgctcagataccaaaaaagaaaagagcagaaggtgactaccagtgaaaattgcagtgaaaagtaagcaaaatgtgtttccattttcacgcttgctagtatcagtgcaccttgttacactttatataaaagttctatatttatatatatacatatgaatatccacttattgacacacaaaccaattccatcgataattgcgtgtaactgggaatgttaatgcacttaagccattgtgtgtcaaagcaaccctgagaaataagtagctaccactctgttcttttccctgaaacactggttttacatttatctggttttaaaagttgttcatggaaaatttgtttatttttcttgcgattaattcccgattttacactcactttttctagttttgtcaccagtaaatagttagcatcaatacttgctgttttactactaattcaagcgcttatcaacatataatacgcttttcattcatgttaagcagttaaatttttatttgcttcaacttttcctaagtatgtgtttactatatgttccttctgcttgtttatgctttttctattcttacttttcatacttacgaaaaaaatagaaacggtcagtgagtatagctcacctctgtatgtaaactgttggtctaaggccaggtaataacagtcatttcttgctgcttggccttcccctgtggctcagctggtaaagaatccgcctgcaatgcgggagacctgggttcgatccctgggttgggaagatcccctggagagggaaagtctacccactccagtattcttgctgctaaggaattttataatctgtaacagtcatttttgaaaagtttttctaagtagttatttgataaaaataattataaaatttgaaaaggagttgcccttttgataaactagctctgttttaagattctcctttaaaaacatcagttgtgatccgttgcattctaataagtgtttggggccaggagagaaaggaaggcagaaaagcgtgtcccggtcagccctgcgcttgtggatgttgttgtgtggagagtgtgtgaggtggtgagtgtgtgcagagtgtgtgaggtggtgagtgtgtgcagagcgtgtgcggtggtatggaggcaggctcggtcgctaccgcatgtcatgggaaccagcggggaggacctgagtggggtgggtgctgagcagacaggaagaaaagatggcaatgaaaaggaagtttagcccattggagagtgccttcttttggtaggtaaaaagcttaaatatcaataattttatatagttcagcttataccttcattatcaacttgtgttagtaagggaaaacatcactgctaaatatttaaaatgaagacaattactgaatagctgtagtatttataaggagaaggggtcagtgagactagaatggaaagagtttatggaggaagttgatgtgttctctgatacccaccttgttaaacacccttttggatctagcttggctcccatttgtgtaaagcttttactcagcacccagatggcaggaaagttctccatgctgggagagggtgaagaacctgtgtattcatttgtcatcaagctttgttaatttcctagaacatgttcctgaatatcacacgttcttgttcttctgtccagaatgtgttcaaactaagcttcctggataaaagttcctagtagtttttttttaaaaacaaaaaaacaaaaaaaccttctccctgtcctttcaggacaagcaccagctctggtcaatgagcatttcctcactgattgccttaggtacgggtttcctgtgaagctctgagtaaagcttcctaaattactcctctgtgagctaacataaaccatggttggttgtttgtttttttttcagaagatgtttttgggtgagttccttttaaaagaatggattagtgaaatagtaaacaatgggctttggtaaaggactttttgtattgacctctttataataaccatgggttgttatttaaatcctaggttacttcctgtagtcttttctcaccagatgtacttaacgctcctgtggagtggggattttatttcaagtgtctttactttaagagacatgtgaggtgaaagttgtctataaaaatagcatgtgtcttacaaacagaagatactacactcagcatagtaggctgagtgataggatttaaagtaaggaaagagtagttgttcatggttgtatcagtgggtctcctgttgttgaacatttgggtgatttccagtattttgctttaattaaaaatattgtaacgatggaggtgggagggatgttcaggtgagaggggatgtgggtaaacctgtggctgatccctgttgctatttggtaaaaaccaacacagtactgtaaaacagttatccttcaattaaaacaagtaaattaaaaaagtattctaatgaataagcttgtacagatcctaaattccttacctgaaatccatagggagactagctgtttagaaattcacatttttttttgatttcacaattgttaatgtgatgtatgttccaaaattacagagcatttctacggaacactggtaaacaagttactgtttctgatggaaaatgtgtgattaccacagtgttggctaaataaagcctgtaaatagcttcatattaactcaggttaattttattgctggatgacgttatataagaattaggaatttggttttgatttttggagcttgtgggcatgtgcatatatgtatgtgttctaatgtatttgtgggaatgatttccactgtggattttctggatgaagagaacatgcatttctggttttattcagcattgccaagctccccttgctggcactgtacctgtctctgctctcaccagcagtgtgtagtggcagagctggtctttccctgcgttattgctagtctgtgttgtcagacttgaggatttttgccagtctgatgagtgaaaaatagaatcaaattgtagttttataaagaacatttttaaagacaaggaatggcctgttcgtgtggcttttagttcaggatttttgtatagattgacaacctttttagcagtgactttgaaggtgtctttaagtagcagccgggactcaagaccttgctccctctcctttcttgcttctctgcctctcttttgtcccagatatgacgatccaggcgacatctgtgttcagtctgttagtccagtaaggagctaacatgcaccatgtagtcaattttgtgtttgtccttagttgatatggtaatagtttattttctatttcccaagcaagattggggctagtatattaatagtgaaaagaacatcctggaaagtgcagaattccatgttaaatgttaggatacgctgtttctctagcccagggaactttggaattgtggtgcaagcttctctctgcctttgggctcccgtgctgcctgtcgcttctcagtatgctcctatccatgacgggcttctttcagtcactcagctctcactttaagtatcatttcttcagatgcctgaagaccccgtctaaaatagcctcattgtctttctgtcccatccatttgttttattttcatcagagccatcagtgccccctggtgttttcatgtttgcttactgtcgggcttgtgctactagcatttaggtcccatatgatcaggacctgtgtcctggggccaggaatactgccaggtatgggctgcagtttttgtcatttttcctggagtgtcgtctttgatcctttgcctttctgctccctgctgcctccagatcacccttccccgcagccttccctttgctggctcccaatctcctattcatccctcagtatttaggagggaaggcggtacatgtactggagaaggcgatggcaccccactccagtcctcttgcctggaaaatcgtggacggaggagcctggtgggctgcagtccatggggtcactgcgagttggacacgactcagtgacttcactttcgcttttcactttcatgcgttggagaaggacatggcaacccactccagtgttcttgcctggagaatcccagggacggcgggggctgccatctatggggtcacccagagtcagacatgactgaagggacttagcagcagcagcagcgatatgtacaattgtatttcatttggaaagtataataattactttggtcctcttttgaaacatttccaaaacatctatatcttgatttaaattatgactttgaagcgaagtttgcgtatttgacacttgatttttttggtgggggagtgaggagtggtgggggagctctaagggaagtcagtttcacccactagattgcttcctttgctttgagaagattacttccttgttgtctctctgattattctacctccaccccccacccctcccctccacccccattaagagcataggtccttgtgttaatcatttggaaggattcctgttccatgttttccacttttagttattgagtaatagttttagtattgaataatagttttcctgttacagacatcctaagaggggaaaagttacataaaaccacagatccatgacatttagaaataaagctgcccgtaccattgctcaggtgttgcagatgttggagacggcatcgcacaaaccatatgtattagaaaataaaagggatggaggcaggaggttaaggaatcaggaaagcctcatttctcaatttcttgctattgcaagtttaaattggacgttgtgcctcattttaatatgcagttatttggggtgtttatatgttttatgttttgatcactgttcagtatttaaactccttcaaatgtgcaaagattaaatgtttaataaaaattgcttgttgttttcaacatctgtgtgcagagaacaatggcccactggagtgcagaaagcttgtaaagttttcaaatgtattgagaatgacagaaagttcagtgaagagtttgcttccctcattacagaactacttctgtggctgcgattacactaagagcatctttaattgctttaaaatctgaatgcatgataagaatggattaatttgatttttctgttactacaagtagcagatggtttatgtcttaggaatgctcatgttgtaaaatgagatccccagctcatccgtgattggtcactgttaatgaagcatgctgtgctgattattgatttagaaaatggggatgacatgagcattgtgtgtgttgctgtaataaattaaagaggagtattttaatagccagcagacatacaccttaaataacatgaaatatttgattttctattcaggtggtctctgccctgtcaaactaattttattgtttattaaaaagatatacttttatagtttcagctaacaagcagatggtcgtctttccttatttctgttttgtatcgctgtgtgaccgatcagacgcatgatacgaacccaaattagcttgttgtctgcaaagcggtggtgcagccaggggaggaagtcttctgcagtgtgtgtgtgtgtgtgtgtgtgtgagtgcctgcttgtgcacacccacacgtctctactgctgccttagtattcaattcttacttgcttttgaaaataaagcactctattgaaagttctttttgataattttaatttgtcttgaattaatttttaaaggacagatgcaggaggaatataatgggaacgtcagttactggttttagatggttttctgcgcatgtggttgtgaatttacactcgtaccttgctgcaagcacactgcaagagtcagagtgatggcggtttacgggtgttttatttaaagcgctatgtgtacggtgtcaggtgacgctcacagacatggaagcgcgcgctctcgatggccgcacaccgtttagggaagcctagcaggtggctcgccttgttactccacttactgtctctcggtctgtttccaggagattgggtgctctgtttttttatttgaagtactaaatgcattacttatattggaataagaattttgagttatttcatgacagtttctcttttatggcagtcttacctgtggccatgatgtcagggttacagactaaagtgctgcttgccttgactgtgggtaagactgaagaagaagatacttgctggtacactcttttagctttgtgtacgtacacttacatttttaattttcaatatttggtgaattctattttatttttatagatggatttcggttcacataagcatggccctttttagcagtacagtgctacttccgagtaagaaaatgaaagtataggtgttaggattgcaggcttaaagtaacctgagactacagatagaggcagtgagataaggggaaagagcatgctgaaatgacccactttaaccctgagttttagcgatttaaagcacattcatcgtagtaaaaaaatttaatgtttagtattaatcacataaaaagagagagactcagtgatttaagacacttgatttgatagtatgtcattattacatttaaaaaatcagtctacataatatttctgaggttgacgtccttgactttatattatttcacaagatgtttgggaaaaacctgtagaggttgggaataaaattaaatggattaatttatgttttatgtgacagtctagtttcaaaagaatattagaaaagtattcattatcaaaacattatatgggagaggaaagtccaacctgttgcatatttgttgaatagttatagtgtgattaataagtattttaagctttttctcctagtcagttaacatatgtgtttttgttcatttgtttatcaagggacaaaaaccactaaaattaataagaactagtttttagataactttacttttaaatatgttatgactagtagtgaacttcactgaatgggaaaatgaagagatacctggtttgttttgatcaaacggtaccaactagatatggaagagaaatttccatttgatacaagtgttttaaaaataacacattcttggaaatggttaaaattgataacaaaagttactcaaattaatgctcttggaaataattttcagtagaataattgaaaagatttgaaaattcccatcagatttacctaagaatttttacttcaaagggccaagaaaattattttttttaatgtatatcttatagtttctctaaggcacatatatcctctattctgtaaaccctaataaatggatggctttattatttttcagtgtaaattagttttataatttagctttcatcataaagtgactttttttgctacagggtagaacaaattagtatcagcatcctgtactgtttggcctgccatgtttatgtctaatgcattttcttcccaaacagtagctacaagaagtctagaaagattgttattaaaagcaccttttcaagagaaacgtcaatttactgataatgatttttgtttacatttgtgtacatgtgctttctggatggaggatacaaaatgtttttttttgtttttatatttttccttttacaatacaaaacactgctttttgaggtaaaagcactataggtgagttgctgacaactttggaaacattttcagaaagcgaaatgcttgccatcaggtacactggtttcctgccacgtgaaattctaacattctgaattggaatatgtcctatctaggattctgcagttagatgttttaaaccttagccaactaattttttaaactctttcatgttttgaaagatttgcaggaagtagaggaaaattggacaagactgtaaacgtgtcagccacatccctcacatcttgttcttcagagcagagtaaggaaataggagacttgaagtgtcgtagacatctcattgcacatgttgcaataaacagctatagaattagatcatgaagtcagctaacctcatgtgcaatgatcaggtagttactatggtaacatttccatttgtggatttttgtagagttaaaatttgtaaccatcctgtcttaccaccattggcttttgatttttcatgtaaataaatcaccgtgctacctgcatcagccgcagcactgaactaccatccctatactctaggctagggaatcaaaactgggaaaatgaaagaaataagagcattttgctaaattacattttaagactgtcctgatgttgttggtaaaattttaagcatgtcttaggagaagtaagaggattgccagttactctctgagatgcttggatttttataagtatatgatatgaaattggttaggcgtggtaacagtaggaggtaaggagggctttaatttatcagctaagtgggtgctaagtaaccagaaccgaagtaatgacccttctgaggctaagaagattccttttgagagcagtccccttttattttaaccttctcaactgtttgaaatttgttctgtgttcatatactcaaaagttgccctgcttatttcacttctgattataaaatcagactctaatatcttagattaacttggattaaaatagcctataatgttcccttgtatcaattactgtattccagtaaagatccctactgtttttgttttgttttgcttcccaaagccccctgctgctgttgattacacctaggtctgctactgattggaactgttaaaaggcagagacggtgtggctggttgctgaatcatttaattgtagggctaataagagatgttctgtctggggcctgaaagaaatagtagcatttgagtattatgtataaagaggccaagatatagtctttaataatttttgaaggtgtgaaatttatttacctagtgaatttatttacttgtagcataatagaggtttatcggcagcctggttagattcttaaaccctgtaagtgaaccctgagagaaagagagaaaggaggatagatgctagagaagaatttgtacagttatttttctctgacaattgaatgctgtttgtttttttaaagatgaaagaaatggagagctataccaaatggatagctgaaacaaatggatagcagttcatcagttgagacatttgataataaaatgataggaaattcagttaagtttgtaattgtggctgtgtttgtaaccgtgatgcacaatataaagtgaaggttatgtaaggtacaagcccctcaggagaagttaacatacaagttttggaatcaaaagataggatttgcatgatagccgagggcatttatgaggtgtccacagatcaagaacacccatcactttgtaccctcaaactgcttcaaagtttgaggtagttagtcctttgctttacttactgagggattatttgaaagagaataggtctgtgcaagtgtattacatggtactttattactatccctcttgctcataataagtaattgcttattcttttcaagacatttcaggtttctaggtgcagactaaatcaatggttttaagtaatttgtgtaaggagacatcttttgggaggtatgattgactagaacttgaaatggggaaaagcgaatgttcttttatcgaaatttatgatatttatcgaaacattttgatcagggaaattgcatgaagggtgctgtcagaagggacaccgcctgtcaggtagatgctgggttggagggactggttagaaagccctgcagctgacaggagaaaggaggtcggacttggcggtggcatctctttcctttcgttggtgactcattgaatcggtaaactatgaataggactgctgaaacctaattaatgaatcgtgaacatttatgtcatctcaagtaataatcgtaatcattgttgtgatctcaacatttgacacaatattttgttacaatagtcattcaacttctaaagtggggagaaaaaaaacccgaaagctcttggattggtctgctggggctgccatgacagggtatggcaccagctccaccaacaccatctccacaaagcaggtggagctgcctcccagttctggaggcgagaggtcagaggacaagctggttctagcggctcgggctccttccaaggcccctccccgggttgcggatggcgccttctccccatgcccctatcttcagggtcctccctcagcctggggctgcatttcctctttccagaagaactccagtcctgtgacaggggccacctgaccaccttgtccttcctgtgtctccagacaaggccacagcctgaggccctagggttaggatgcaaacctataagtgctgaagggtctgaatgcaacccatgacacctctgtttgaagctggtgcggtttacccgccagtggctaatgacacagatgactaatcaaaccagtgtggtcacagaggagagatgagcacggcgccgtagggcccgcagtcacctgtccctatgtagttggcatgtgacggagtgttcacctaggtatgttttattattttccagtttatattttcagtcattgtactggtttccatctgtggcagaaatggagatgaaaggctgagtttcaaaagtgcagtagaactaaactccttgtccctcctcttcccttgcttcaattcagttcagttcagttcagtctctcagtcgtgtccgattctctgcgaccccatgaatcgcagcacgccaggcctccctgtccatcaccaactcccggagttcacccagacttgcatccatcgagtccgtgatgccatccagccatctcatcctcggtcgtccccttctcctcctgcccccagtccctcccagcatcaaagtcttttccaatgagtcaactcttcgcatgaagtggccaaagtactggagtttcagcttcagcatcattccttcaaaagaacacccaggactggtttcctttagaatggactggttggatctccttgcagtccaagggactctcaagagtcttctccaacaccacagttcaaaagcatcaattcttcagtgctcagccttcttcacagtccaactcctcacatccatacatgaccactggaaaaaccatagccttgactagatggacctttgctggcaaagtaatgtctctgcttttgaatatgctgtctagattggtcataactttccttccaaggagtaagcatcttttaatctcatggctgcagtcaccatctgcagtgattttggagccccccaaaataaagtctgacactgtttccactgtttccccatctgtttcccatgaagtgatgggaccagatgccatgatcttagttttctgaatgttgagctttaagccaactttttcactctcctctttcactttcatcaagaggctttttagttcctcttcactttctgcttaggataatctcaattatcatccaccctcaccatccagacttcttaagttttaaaaaaacaagcattatttttgaaatattattgataataactggattataatgttgcaccaggtgggcatttatgtacaactttgaacaggtagtcatttatctagaagagagatcgtcaacgtatggtccctggaccagcagctcagccttagatattaaccaggaaatttgaggatagagtctagggatctttgtttaatgagaccttgggtgattctgctatacaccaacgtttgagggccactgggctgaatacaggagtaatacctaattttactactgtttttagtagttgttcccccccccccgttattttgtttatattatctgatactgagattttgattaggaataccactcaaaattattacattgtttttgtggggaaccatctctgttgttggtttattgtgtgtctttctagaaatgttttatgtttgcaaaagcaaattctgctctctttaaatatatgtgtgtgtgtgtgtgtgtgtgcttgtgtgtgtgtgcgtgcacgcacacacgtgtacatgtacatgtgttcctctctctctctccttctacaggtattaacattggaccttgctatttttacttataacttgaaagtctttctatatcaatatatctgtcttttgtcctcctcttttttaatagctaagtagtaataccactgcacgcctttacagcaacttacttaccaggtccccttttgatggacatttatgtttcaccattttgctattttaaaaattccttgagaaatattattgtgtatttaagttacggctatatagtttcccacatattgaagtatattcacaggataatttcctaagaatgtaatctcagggtcaaagagtatctatgtgtatatatatacactcataattttgatagctatttccaaattgccctccatggtagttgtaccagtgctgtaccccctttatcagacagaagttattacttcaaaaatgtgttttcttaaggtgcagcagtgttacataacagttatgtttttgaaggaaacaaatctatgttatgctgagaaaatacccccaaaactgaaagatagcttttaacaaacagtatataagactactacttcagagttttatagataagttataatatgttttagaaacgtcttattgcatactgaagagaggattgatgattgtctcctctaacctgaagtaaatctacaggtagtgattcattaaacgtgatttttatatctagaaaaacatatttttgaaatagttccagagtacttggacaatttctaaatgtgggaattatttgagatattacatttgtagttgcttaaaattgtatgacttttttttggtatctatcatagttgttaattaaaactctttttaggttttttcatttactcagtatcattggtttatattgtgtgaatcgtttcaaaatctaaaatgaagcagtgagtgagaaagagcactgggtttttggtggtggttttaaaaccattctatactacctccctccccccgccccgcctttaacactctcttaacttaaaactactaaacagatttttattttaatcactggaacaaaaaatgttctcttgggctgataccagtactttctgtgccaagttacagaccggaatctatttttacaggccaagatagaaacctctgaaaaccagagtttgtaatggagacactgacaggcccttagctatcgcagcacacacggctctgctggaatccgaaggcacgaggcacggggctccacaggcaggggagcacggggcttcagcagctgctctgtcagatgcctttctgctgcggtgtaggaagagtctgtgcaagcgcagccaagcccggggccgtgagagcccggcgtgtgggccagttcctgccctctggatgcttgtgcccaggcgcgcagacactggggaagtagtgatgcacactcgtctggagacggccttgtgcgcggatatggtcagggagaaacacgtgaacttcttggtctctaggtttaattcacggctcagccctgaaagtcttgcatgtttttgcacgtagggttactacacatgtttctgggtattattgcaaagctggaagatcagatcaattacatctttattataataccatccctgaagaaagcttaaatgttatgttgttacacaagccaggcaagtttgatactgagtagttgacttggaaacttactgtttatgtcttctttgagggattctttttaggttaaaaaaaataggcttttctgaaaaccacgtttgattgctcaactttatttgattaaacaaaaatcattaaaacaactaccatttttaaaattactgtgcttttttcagttatgttttattttaaatgagactggttcttctactattagttaatgattgccatcagttaacacagaatgaatggtcctacagtgtaataactactttacagggagaactcagaacgtgtcagacgctgggatgcggtgaaaagggcttgagccctacaggtaatttgaatgttcatgaagggctgtgttttcgcgcttgtaacaccagcattatctagtctcttctttccctttatcttgttaaacgtgggagagaagtggaggtgccatgtcagatgcgccatctcagaagcatcctgaagtgttagggaaaaccagtgtctggtgggaagataatgaagtgacactttgctgctacaggttcgccagtactgccagaaggaaggggtaagggggagctgttaatttgaatctgaatcagattttctgttctagttaaattttccttagctattgacctatatatctgtatctgtatatccgtatacatgtattaaggtttaggtaggatacgtttctgtcctaagagatacgtcttatgcatcaagttggctttccattaatgaagagaatgtggacatttctgagtactttcttcacctaaagtgttagaaacaatgctttagcacatcctgaaaaatggaaaatgtctaaagtaagctttgtagttctgtgcactggtactaattctagaataaggagttttcatttccatcttccactttcttgctccgtttctttaggaacgagagtctgtatgctaacctctgcttcccctcgccactgctgtggaaaacttccccaagggcttagggaaaatacagtgttgatcttggctgtacaggcagaagttagtgtcatattttacaagttccattttataagggcacttcacgaagaagtgaggtaaaggagcggtgtgcctgtgcgtgggtgcttgtgtacgtgtgtgtgtgtgatgatggcggaaagacagaaacagacattcctgagttcctaggtttacagattaatctgctttataaattattctggaaacaaaagtacaataatgtaagcataatactgtatgagaccaaaatccagaagcatttctagagctgactaaaatatttttgttatttacattcgtagctgagggggctgataaccattaagggcctgctggcatgttagacagtacacagcttctcggccatactgacactctcaataaatttactcaatccacacctgccattagcagtttctggctcaagtctttctcaggaggggcagtagttttcagcagtgaaggcctctgtcgtactgacactgttaataagtctgtccgatgcacatctgccattagcagtctctgactaaactctctcttaggaggggcagtagttttcatcagtgaagggagaggcttagttgtgcgttgcctctatgcctcgtgaagctgaggtggctgaggcggtgtcaggattttcctttcccagcccatccgtgtgttttttccccttttttagttttcttacttgaacttgatacgccagacactgggctaggagctcctgaccttcaacagttattattgactcaaaaacagctcaaggctttggatttaatttatgatatttatacttttaaatttgctttcaagctttggtatttttgctttctttacatattgaccttaataggtcagataagctagtgctgtgtcttaaatatgttatcttttaattgtaaggaacagatttaggtattattggaatgtagaaaataaatttacttcagaaaagaatttagtatgtttttgaacttaggtaaataattggaggagacttttgttcacttagtttccaagaaaatataggtattccaggtaagagatttggctgatggatgaaattttatgccagatattgaaatatgcaagaataccttggggaactagagaatggaaggctgtgagaggaagcgttaattcccaagcttgttccttttaacatactgtacttcttttctcgttcctttaatataaattgccatcatttcctctagagagagagaagtgagctctggtgtcttcgctgttgctgatgagcttagtcacagccatgaacccgcagccgccgcggggctgcatctgggggctgagactgcgccttcgcagcttgctccttcctgtcgaggccgcgctctcggcttggggtccgctgagcctgcccggcctcagatcagctgccggctcccgcgtgagctccgcgtccttccccggcctttgtctccgcagcttccgtacggtttcctcatagcctgacacgctgcttgacacgtgagctgtgtttaggccgcgggagtgtgaattctctggagccagagctcttcctgcgtttcccaggagctggtcatcttgggccggcctctgggctccgaggatgcggccggcgctggctccgctgagcgtctcacctttgccgccggcttcctccaggcctgcctccggcctcccgcgcttcctccagcggcgcgctgggcaagcgggcgtggagtctgcgatcctgcccagggggcgggtgggcccagagggacactcgcgggctttctgcgcggaactcccagcgccggcctgtgtcctggcctgttcgcatcgcccagcggctgagtgacggtggcgccgtcgcggagcgcctgacgcctccgcgtgctggccgcgaacatgccccgtgttctgagtccttcggccttgtttagtcctcacaaaacctgtgacgtgtacttcccacttttgcactgagggcaccaaggcagagagttcagccgaggtgcctgaggtccgataatgagtgaaggcgtttcctccactcgagcccagaatgtggcttggccctggagctcgcagtggcagagctgaaggctcccgctgcccgggggctacggcgcgggctgctgctgccttgagggctctcctttcattctcctagaagaaagaacccttctgttttgcttactggtttttttttttttttttttttttttttaatctgaagtagaaatacgggattgactttaaaatgatctaatttctgaatttattcaattcaaaagtttaaaattgaatgaaaaggagttaggaaacatttcacagagaattgaacatttgagatgaactttgagaagtgattagtggtgtctggtctgatgaatatttattcattaatttgacaatatttactgtctgttctttgttaggtcatgagaatagaggagtgaaaaagaaaaagaaaggtttcagagagaggggaatggattgggataggtttccctgaccaaggctagtagcccaaacaaatagagaggaaggaacactagatatctttagagaatgaaaagatatgaagacgattagaggtagatatggataggtcaggaaaggtatggagaagttgttaggtctattaatatttcagtagacattatgcagtcacagacattactgtattgatgtaatatgaaatataaagtaggttatgggtccaaagaataggattttattaatagctctgcttcctaattgtatgaatttgaacaagtgatcttatgttttcataagcaaatatttcttataggatatatcctcatgttatagttttttaaagcatacacagggctctaaactgaaaaatctttcctcagacatagcaagcttatatttatatatattttcaaaataaggagtcatgctgtatatattctgctacttgctgattttagtatcctgtatatattttcttacctgtgaatttatacttttaatgcttatgtgttattccatttctgggttaccaaatttataaaaccaattctttatcgatggatagttgggatgtctatagcttttggctattacagtcaacatctttctgcatggatttggctagagggcatgtcagtaggataaattcgtcacagtagcattgctgaaccaaagggcatacacatttataattttgatacttgttgccaagattgcttttcaaaaattcgtgcttctataatcaagttaatcaaaatcaaaatgcgtatttctccacatccttatcaacactaggtattatccaccttttttttatttggcaaatttgatgagaattacgtctaattttttagctgacatttctttaattgtgagtgaggtgcacattattctatgttgcatgcacacacattcacacacagtaacagttcattttgctgggaactgctgagtgctctctgttgctcgttcatttaactcttccagttttatttttcttatacactttttaaaaagaggacagttacccttcttcctcagtaaatggttgagatgatcaagtaagttagtgtttgtcaaccgctttttttcattattgcttccctaaaaaaacttttaaacagtgttcccctaatcctccccctttcccagtgatgttttaataccacaaatgtacacggatacgctttgtatctgtttatcttccgtggcctcttggtgggccataagccattgtaatgtctaagatttctctccagctccaccccaataggcagttttcatcccctcaaggacagtatcacgcctgctgagatcatatggtacatgtaaagtttttgtaaagtgcaaagtgctatttaaatataaagctttattgttaatagtttgcatctcatgtgatagaatattccatgtctgttttgcagctgcctttttctcattgcagatttcccttttgtggctctaggcattgattgttgttctgttcaattcgctgcctttgggacagtcttgattgtgctgacctctcctcagctctccctgcctctcattaagatgttactctcctttgagagcctgtcctggataaggtcactttctccaggaagtctgtttagtcccttgtaattatgccttggcttcatagagttagagctcttttaatacattttttctgctgtgacattctctcttttattataggtctgtctatctcctcctgatagattgttagtgtcagaatagcagtgatgttgcctcttttcatcctttattcccatatgttcctttcacggtgccattgtacatggtgggaagacaggagggacgtcttgcagtggatttcgaaagacatttgaattcatgtcccagccactcagtgtgtaaccttgggctgagatctttaacctgcaagcctcagtatccacctcgtatccacccaaaatagggctaataacgccatctttttgataagattgctgaaaagattgaatggcataataacataaagcacagtgcctgccatttagttaagctttccattaaatattcagtttagttcagttgctcagttgtgtccgactctttgcgaccccatgaatcgcagcacgccaggccttcctgtccatcaccaactcccggagttcactcagactcacgtccatcaagtcagtgatgccatccagccatctcatcctctgtcgtccccttctcctcctgcccccaatccctcccagcatcagagtcttttccaaagagtcaactcttctcatgaggtggccaaagtactttagtttcagcttcagcatcattccttccaaagaaatcccagggctgatctccttcagaatggactggttggatctccttgcagttcaagggactctcaagagtcttctccagcaccacagttaaaagcatcagttctttggcattcagccttcttcacagtccaactctcacatccatacatgaccactggaaaaaccatagccttgactagatggaccttagtctgcaaagtactgtctctgcttttgaatacgctatctaggttggtcgtaacttttcttccaaggagtcagcgtcttttaatttcatggctgcagttaccatctacagtgatttttggagcccccaaaaataaagtctgacactgtttccactgtttccccatctatttcccatgaagtgatgggaccggatgccatgatcttcgttttctgaatggtgagctttaagcccactttttcactctccactttcactttcatcaggaggctttttagttcctcttcactttctgccataagggtggtgtcatctgcatatctgaggtgattgatatttctcccagcaatcttgattccagcttgtgtttcttccagtccagcgtttctcatgatgtactctgcatagaagttaaataagcagggtgacgatatacagccttgacgtactccttttcctatttggaaccagtctgttgttccatgtccagttctaactgttacttcctgacctgcatatagatttctcaagaggcaggtcaggtggtctggtaatctgcaaatatttcttagcacagagaaagacattgaacgaagtattttcataatcatttctgtttctttcttatttgggaacataatctgttgttcattatacacagagaaaatgtggttttctttaaatcatttctttttttaaagaatatgtcctgcagtgtaattcagcatatgggtatcatttaaagtatacctgaataataatatattatgcattcttcttttgtctttcagtatagtgttagaattattaaatagccacgatgaaaaaaaagtcctataaatcactgagcaaaagacaacccagttgagaactgggcaaaagataggacagcactctgatggagagacctgaatggccagtagagggatgtgcatgatcaattccatttgacaagctgactgggccacggggtgcccaagtgtttgctcagactttattttgggtgtttttgatgagggtattttggatgaaattaatatttaaatagacagaaagcagattgccctctctaatgtaggtgggcctcatccaatcagtcgaaggcctggatagaacataaagctgacctttctaatgagcaagaaggattccatagtgcaatgatttggacttcatatacaacatcccttcctgccttcaaactgcaacattatctccacctgtctaagaggctagcccattgactcttcctgaatcattctcttgctttcccattttgatcattgaactttctggtttccattaatcatgagagccagtttctttataataaatctctctctctgtctctctctctctatatatatatatatatgtatgtgtgtttgtgtgtgtgtgtgtatgtaaaagtgatattcagtggcactcatttatttacttaagattttggccatgctgcacagcttatgggatcttagtactccaactagggattgaacccaggcccttgcctgtaaactgctggactgccagggaattccacatctatgtatgtcctcatttgcagggatgaggtgggggaaaggtgggggagagagagatggggaagagggagaaagaagggaagagcagggaaagaacattgcctattttttctgtgtctctagagtaccttcactaatacagcagatggaaaatctttctatcagatagtcaaggtgatgctaattaaaaccacagtgcgataccacttcatactgttcagactgacaaaaaaaaaaggaaaggcttgtgatactaatacagaatttcccatatcaaatgtaatttggttcagtgactttggatcagagtttgacagtattttattagatgagctaaggatttgatccagcaatttcacttataaaatgtcagtttacaagttgtaaagtctactgaaatgaataggtttgtcatcaaaatataattacattaaatgttgaaatttattttaaaatttagttttttgttaacatgcttcccaggttggtgctggtggtaaagaatctacccaccaatgcaggaaattcaggagatgcaagtttgacccctgggttcggaagatcccaggaaatggcaactccagtatttttgcctggaaaatcccatagaccgaggagcctggcgggttcctctgtccatggggttcatggggttgcagagtcagacacaaatgagcacaagcatgaatttatgaacaacatgcttctaatgcaggttggttcacgattgacttttgtatttgattgtgtgtgcagctgtagatacatgtatgtgccctgccatatggattcagaattgctattttgtgcagacttgtatagagcagttaataaaattattagtgaaatgaagtgttttgaagaaatatatcaagaatttcagtcaccaagtacaatatgagattctagtagtaatatttttgtactcttctttttttgttgctaagcattttctctcagtaaataactggaaaaattctgtaaggtataatgttggtgtttcaaaggatattgttgctttagttgctaagttgtgcccaactagcccaccaggctcctctatccatgggatttcccagaacactggagtgggttgccactttgttctccagggaatcttcccaacccagggatcgaacctgtgtctcctgcattgtcaggcagattctttaccattaagccaccagagaagctcctccaagggatgtatgtgctacatataaatcagttcagttcagtcgctcagtcatgtcccactctctgcaactccatgaaccacagcactccaggccaaacatcaccaactcccggagtgtgcccaaacccatgtccatcgagttggtgatgccatccaaccatctcatcctctgttatcaccttctcctgccctcagtctttcccagcatcagggtgttttccaatgagtcagctctttgcagcaggtggccaaagtattgaagtttcagcttcagcatcagtccttccaatgaacacccaggactgagctcctttaggatggactggttggatctccttgcagtccaaggcactctcaagagtcttctccaacaccacagttcaaaagcatcaattcttacacgctcagctttctttatagtccaactctcacatccataggtgaccactggaaaaaccatagccttgactagacggacctttgttgacaaagtaatgtctctgcttttgaacatgctgtccaggatagtcataactttccttccaaggagtaagcatcgtttaatttcatggctgcagtcaccatctgcagtgattttggagcccaagaaaataaagtctgtcactgtttccactgtttccccattgatttgccatggactgatgggactagatgccgtgatcttcgttttctgaatgttaagtttaagccaactttttcgctctcctctttcactctcatcaagaggctttttagctcctcttcagtttctgccataagggtggtgtcatctgcatttctgaggttattgatatttctcccggcaatctggattccagcttgtgcttcttccagcccagcgtttctcatgatgtcctctgcatataagttaaataagcagggtgacagtatacagccttgacgtattccttttcctatttgggaccagtctgttgttccatattatacatataaataatccatattataaagcaaagtattagtttctgaaatatgaggaaggcagtagactgcacaggtatattttataattaaactatgtaagtttactgatttgaccacttagattcaatttaccacatcaaagtaagtagtggctttacttaagtagttagtaaaaacttagaaatttacactacttgagcagaattttcctactgtattaaaaataattggccatcttgatcttttacttgattttgttggatttaaattcctagaaattttaaatatatatttataattgtaaaagttacagcatagcataaaaacttttctttgctaaggaaaactttgttaaattgtacttacataaaagtcagtatatttggggttgtggagggaaaggatcatttggttttgaaagcctctttttataggaaaaaaattattctgtaataataacaatgtgcttcaatcctgtttattcccgttagaaattaggacactatttccaggccttcaacaattttcagagccgtcagatatcttacttatctccatttgtacaaatgccattgtaatttcaaatgactgtgtctaatttagtgtacttttaaacattttattgtggtattcagtgagattttggagatagcctactatcgtcttctgcctaaagcgtatacacagaaaaaagaggtgtctgtttctgctggtgagtttctctgatgaagggacagagtctgcgcagccctctgtggtccctgtgtacccatattactgttgtgtagtcctgcggttttgttaattatacccttttgtgagtcctttcaggcctttgtttgttcttcatggagttgatggaattgtgttgttttctagtatgcattgaaagtagagtgagagtgttagttgctcagtcgtgtccgactctttgtgaccccgtggactgccgcccgccaggctagtctgtccatggaattctccaggcaagaatagtggagagagttgccatgcccttctccaggggatcttcccgactcaaggatcacacccgggtctcccacactgcgggcaggttctttcctgtctgagccaccagagggccctagtacgcattagcgtctcaaaaaggtttcagtggtggcggcagacaccagcatattacgtgagtgctgtatcttgtcttctgtcttagtaattagccctctcttcttttttttttaatatgtttgtttatttaattcatttgactgtacccgctcttagtcgcggcatgcgaatgcttagttgcagcatgtggaatctagttccctgaccagggattgaacccgggcactctcaactgggagtgcagagttttagccatattccaccagggaattctcagacctttcttctttatccatctttcattttgtcggtgcttaaaactttccctctcatgaaagtgaaacctaaacatttaaattctgattttgagagtcttatgtttacattttaagctatgcatatgtaatcagtgtttttacaaggacatctgaatggttttggtattagaacacgtattgaaatcatttgtacacataccttttgggtaaagatggaacagttacatcaacatgtggatatctaagatcctgcgaggaaccatcaagtttaatttttctgctatttagtagctgatgatttctgttaagtttgttcatttgtttattattgtatttctttatagccccttttcttaggacaattggaaatcaagtgctggtggggctagggggtgtccatttgtgtggtatattttggtctttcccgttaccaatcagagagcagccctggaaaaatgcttttttgccttagagttagttcttttggaatctcaccttttgagagttttggtctctttgaattctggaactcctccagtgaacttaccgcatgttttctcgtaaatgttccacttatctactggtagagttgtcagataaaatatagggtgcacagtcaggtaaataaagaatacatttagtataggcacgatccaaatattattttgttgtttttctaaaattcaaatgggcatctgtatttttatcttacgttatttcaattaattaattaatgcttagtttgcagcttacttcctcagctttcctctcactgaactctgagccacttgaatgaaggggtgcagttacaccctgattcatctggacctggttttcctgtcactgtgatgtttactggctgaaagaatgagctctctaatcagctctgagtatttctaaagcagctttgctcagctgagtttgcccttttatgtgaatttgaattcattgaaaaaaaaaatcctgtttcaaagaatagttgcagatctcaagcttaatggaaaaaattccatctctccttcccttcgtcatctttctctcccttcttttttcagctcttactataattagcagcattaacagcaaatgtttgctttagttaaattattcagaacatttattttacttgtcaaaggttagatcaggttgttgtttgaactggtaattaaatgcagtctaatacgctctcatgtttatatgcactataagctcggttcctcatcactttgtataattttatgatgttcaaggctgacatttcaaaaaggtttttgattttgtggaaaagaaaacattctgagtagtttgatatctgaggtgagaatgtccaaagttatggttgaaagtatcacatttcagggctgttgtaacatccagcatcacagcggtaatattccccaagtagtgtatagaattacgctcactgcttattcaatttgtgtttgacatgatgatcagtgctgaaggacttggcccctagtaggtgttcaatatgtatttgttaaatgagtgttttaggttatattaaacagtacggggcatagctcagttcttgtagctcagtataatttaagacagtatttgttcctgctctgaggctcttttaaataactccaatttgtgtgcttgtgtgtgggggcaagtctaacacagctaatctttgtatctgggaattaggctcaattatgccttggatttgtggactcgttgaataaatgatttttacaggtgtgtatatgtgagtactttggagtatagatggatagagcacatcctctatccttagaaagaatagaggatagtggagaacaactgttaaactgaggaagggttcacgttagtgtgagttatatacacagcgaatgggcatctgaggggcgctggggaaggtgacttccaagctgcagcttaaggacagatgcgtgtgtgctaagcccttccagtcatgtctgactctttgccaccctttggaccatagcctgccaggctcctctgtccagggattctccaggctggaatactggagtgccttgctgtgccctcctccagggcaccctcccgacccagggatcaacccaggtctcttagtctccttcattggcaggctggttctctgccactagcaccaactgggaggcctaggttacagttgattaagcaaagaaggtgaggaacgaaccaccaggcagagaagccatttgttggaagttctgagggttgcggtttgtgggcgtagttaaaggaagagcgaacatggggaaggtgcaggccgagtcccgcgtcttttccggaagttgttcagtagcttccctggcccttagggaacagctcaggacataccgtgtggtctgtaaccctgccttacagaggccccgcctgcctcccgagctggttatcacccaagctgagcccgcagcctgggccccagcctggagcgcacgcggacgtctcctggaagccctcgcacagtgtgttcctctgccggcggccccctccttgcctcccagctacagtccgcaccacttttatttagttgaagtatcaatataacattaaaaagaggccagtcacgtggtatcttaaaaagtattttaatattattgtcagtaaactacaacaaagaaccttggttccactgcagtctttggtctattttcccacacgtgatcttgtttaagtctcacgttagtcatgagataggtcttacatgaaattaacagagaattgtctttcattacaaaatgccatgttttagctagaatttaaagctacttgggataattgaaatgaaagtaaagccatctttcagaataagagcagatacagagttgtgtgtataccaaaccttctttgtgtgtgtatgtatttttaataaaattgacttaagtgcttagccacaagatgtaatctatttgatttcaaatgtaaaccagatgttatcctaaaacactttcagattctacttttatcactgaaatgctagtctgttttttttctttgtaattcatataaggaaactttaaaattccagaggttaacttttgtcagaaacttcattaaattgattaatcacatacctaggtttgtgacatattctcatcactggccgtacatggtacttttatctatgagattagcttgcatgttacataacaattagtaacatgtcactagtttttcagaaatttctcaaaatctaagcatttgtagttgaaatgcaaggagttaggccaattatcatccagtgtactagtgtgtttagcagctaacctgatttcagccctgaaaaagacaagggttatttttccagtacgtgaatgggcttgactcacagggcgtgggtcccaggttgggtcagatatgcagatttcttgcgtcattggtcttccctggcttcaggaagaaaggggagcatttctcatcaacgggtaaggttaaaggtaacagttggctactgaggtggtgagtgcagatggcagaggacagagtgtgtgtgtgtgtgtgtgtatgtacacatgtacgtatgtatgaaggagggccatacgagggtccgctggtctgcaaggaacttgggctctcttctcacatgctccgtttctgagcaggtcctgagcagcaccccaggctaagtgtgtgttcagctaccctgggttcggtctcaggatcctgccacctaaagggacaggcccttgcttctttaaggtgattcttcttagaagattttccgagggcttccccggcagtcgggcgattaagactctgcacatctaacgcagggagccaggggttcgacccctgggtggggcgtggccatgaaaagaggtctttccaatttctaatctatttaatgggctctgtcttctcaaatatgtgtttaaaaagtatttgtttattgcggggtctttgttgctgcacacaggctttctctagtcgccctgcaagggctgcttgttgtgctgacttctcctgctgcagagtgcaggctgcaggacgtgggggcttcagtgattgtggagcacgggctcggtcgctttggcacatggacccagttgcctcgtgcgtgggggtgcattctggaccagggatagaacccgtgtccctgcattgcaaggtggattcttaactactgaaccagcagggaagcctcagatgtctttagttcttatctctttcatgtattttgtgccaaatgtagctagaagttctgaaaaactgatttaaatgaataactaacttagactcagatttatctcattgtactttattggattctttcaaactgtcaccaggaatgccttactggggggaaaaaaaaaaaaggttaccttccaaaattgggagaaacagaaatgaataaaataggtaaagcctttgcattcatagacttataatggggggaatgcattgtaaacaaaacacaggtaagtttgtgctgtgtgaggtagtaatgtgtgttataagaaaagctgagtgctgggatgaagacggagggaggcctgagtgtggctcctggtgatacccaaggtgatgtttgagcagggcttgggaaggtgtggggagagccatctctgaggacggacacctgagggacgtgtttaggaaccaaggaaggtgcagaggcccagtggcaggaagtggcccagcccaggcgagagactgtaagggggcctcgagggccggaaggccagagcagcaggtgcaggggagcttccggagaaaagctcaacgcggtggcggggggcaagatcctggagtcctgggaagatagtttattttactctgactgagatgagaagccagtgctaagttctgagacagggactgagttagatcttgggacactcaggccactgtaggttagtggactgcagttggaaacagggagccctgctggaggagatgaaatagtctgtgtggggctggacctggaaccaagtgatggtggtccagatttcacattgaagaaccaacaagatttgccagtggcttaggcgtgctctaggaacagccatcatgatctgaatttgagcccatatcagtactaaggggcacagtgtcccagcagaggaaggggagatgtgcagagatctgaagcggtgctgagttggattcttgctcgaggaacagagagaagtcctgtgtggcagagcatcctgctggaggagagagtggggttaatggcttaggcgtgagtctggattcagggcctctttacaagagtttggattttatataagtatgttgtgaaacagtttacactggcaaaaatatcacattggatgttgtgtggtaatagattgtaggaggtaggtatgctaggatgtgaaatctggcgataacaggaaatctaagttgggttatacagtaaggattctgttactacctatgaggtagggtgaatctagcttgtgtacttcactgcagttaagagtatgcatctttgtaattgagaaaacttctggaagcccttggacaagttccattcacattgaacagctcatcctaatcaatctggcacaggaagtgatcggcttagaccatttctctctgcctccccaacccccgccatctggtccctctctaggaccacgtggcccaaacacaatttgaatgttgttggaaagacaatcaacagcgttggcaacagcaaggaggaatggaagctctgagaccagttagggaagggcgttgtcagagtaaatgagggatgaagtctacaattaggagtggtcacactgcagagggaaaccagaaacgtgaacaaaaaacgtttgctctctactggagtctcccgtcacacaccttctctctttaagacaaatctgtactaatgctgttgagcaaaaggcagaacatagttcttcagactcttaactcttggcgtttattgcttcacattgtcttgctggtgccggtggtccgtcacgtgtcatgaagacattctgctgtgctgtgcttagtcactcactcatgtctgactctctgagaccccatggactgtcgcctgccaggctcctctgtccatggggattctccaggcaagaatagtagagtgggctgccatgccctcctccaggggatcttcccaacccagggatcaaaccaggtctcccgcactgcaggcggattctttaccgtctgaaccacagggaagcccatgaatagtgcagtaggtcgcctatcccttttccaggggatctttctgacccaggaattgaaccaaggtctcctgcattgcaggcagattctttaccagctgagctaccggggaagcccaaaaggtagaacatagttcttcatattccaattcctggcattactgcttaatattgtcctgctggcgcctgagatctgtcatatgatggaagtattgctgtggaggagcagggaaaaataacttcttgcctgggtccatagaagggaaggtgggtattcagattaggtctaggatttagaaaagtgagtggggaaggcctcatcagaagggaaaggggtgtgaataagcctggggagggagctgctctggctagagaggatcaggcggggcttctgagctgctggccacctcagtgctgtgcccaggtctgcggtggcggggccggaggagcccagccctgggggacggggcgggtgccacacgccggcagcgcgccagcggccccagaggccccgagggccgcccgctcaggacttagggctgggctaaggcagaggttaacgacatctgcatccctgctgtgcgggctgtttgcttttttcactggatgttcatttattctcacatggaatttgggaagatacatatacctgtaactgtaaagggtctgtgagtgagggaaagtcgctcagttgtgtgtgactctgtgacccgctggactacacagtccttggaattctccaggccagaatactggagtaggtggctgttctcttctccatgggatcttcccaacctataaagggactattgcacttctaattctagattttgcaaagcttgtatgggagaaatgtaaactagaatgctttacattaaaagcattccttgttattgtgctttgaagataatggcatttttaagaaatttgagggtttgtgttaaccctgtgttgtcagctgatggttaacatattttagaaatacagtattttaaattaaggtatgtgcattttttagatgtactattactcacttaataaggtacagtcagtcagtcagtcaggcagttcagtcgctcaatcgtgtccaactctgtgaccccatgaatcgcagcacgccaggcctccctgtccatcaccagctcctggagttcactcagactcacgtccattgagtccgtgatgccatccagccatctcatcctccgtcgtccccttctcctcctgcccccaatccctcccagcatcagagtcttttccagtgagtcaactcttctcatgaggtggccaaagttctggagtttcagctttagcatctttccttccaaagaaatccaaggctgatctccttcagagtggactggttggatctccttgcagtccaagggactctcaagagtcttctccaacaccacacttcaaaagcatcaattcttcggcgctcagccttcttcacagtccaactctcacatccatacatgaccactgaaaaaaccatagccttgactagacggacctttgttgacaaagtaatgtctctgcttttgaatatgctgtctaggttggtcataacttttcttccaagaagtaagtgtcttttaatttcatggctgcggtcaccatctgcagtgattttggagcccaaaaagataaagtctgacactgtttccactgtttccccatctatttcccatgaagtggtgagaccagatgccatgatctttgttttctgaatggtgagctttaagcccactttttcactctcctctttcactttcatcaagaggctctttagttcctcttcactttcttccataagggtggtgtcatctgtacatttgaggttattgatatttcttccggcaatcttgattctagcttgcgcttcttccagcccagtgtttctcatgatgtactctgcatagaagttaaataagcaaggtgataatatacagccttcacatactccttttcgtatttggaaccagtctgttgttccatgtccagttctaactgttgcttcctaacctccatacaggtttctcaagaggcaggtcaggtggtctggtattcccatctctttcagaattttccacagtatagcataaacataatttttcagtgcactgagaaaccaaaatatttgtgtatgagtaatgctcaaaattctccaagccaggcttcagcaatacgtgaaccgtgaacttcctgatgttcaagctggttttagaaaaggcagaggaaccagagatcaaattgccaacatctgctggatcatggaaaaagcaagagagttccagaaaaacatctatttctgctttattgactatgccaaagcttttgactgtgtggatcacaataaactggaaaattctgagagagatggaaataccagaccacctgacctgcctcttgagaaatctgtatgcagatcaggaagcaacagttagaactggacatggaacaacagactggttccaaataggaaaaggagtacgtcaaggctgtatattgtcaccctgcttatttaacttctatgcagagtacatcatgagaaacactggactgcaagctagcgcaagctagaatcaagactgccgggagaaatatcaataacctcaaatatgcagatgacaccacctttatggcagaaagtgaagaagaactaaagagcctcttgatgaaagtgaaagtggagagtgaaaaagttggcttaaatctcaacattgagaaaacgaagatcatggcatctggtcccatcacttcatgggaaatagatggggaaacagtggaaacggtgtcagactttatttttttgggctccaggatcactgtggatggtgattgcatagtccttggaaggaaagttatgaccaacctagacagcatattcaaaagcagagacattactttgccgagtaaggtccgtctagtcaaggctatggtttttcctgtggtcatgtatggatgtgagagttggactgtgaagaaggctgagtgccgaagaattgacgcttttgaagtgtggtgttggagaagactcttgagagtcccttggactgcaaggagatccaaccagtccattctgaaggagatcagccctgggatttctttggaaggaaagatgctaaagctgaaactccagaactttggccacctcatgagaagagttgactcattggaaaagagtctgatgctgggagggattgggggcaggaggagaaggggacgacaggggatgagatggctggatggcatcacggactcgatggacgtgagtctgagtgaactctgggagctggtgatggacagggaggcctggcgtgctgtgattcacggggtcgcaaagagttggacactactgagcgactgaactgaactgaactgatatgcgatacttggtttattgcagtagtctagaacttaacttgcagtatctccaaaggtctgtcatagctaatacagtaataaaactttttgtcctatgaatcctggtctaatttttcctgggacatttaccaagccgttggtcaggcatttggttggttttgccactaacagccgtgtgcctgtgagctccctgtcttctctgtggttggctagtcatctaagcggatgataaacagcatctgacacatgaaggcggtgggaggtttaaatgaacaggtgcctaaacagtgcctgcttcctaataaacgctgttatttttgccactgcgtgcatgtgtgcctctcaagtcacttcagtcaggtctaactctttcaaccctacggaccatagcctgccagactcctctgtccatggggttcttcagacaagaatactagagttgccatgccctcctccagggaatctcccgacccagggattgaacttgcagtcctttaatgctgaaccactggggacaccccatgcttttgcggttactattaattaaaaatgttatttttagttttttaaaaaatttattttccagccctaccacttactaatagctaagggctaaaggacagatccaccaggactttcagatggacctcctcacaattactcctgtgcttctgcaaacaccttaggccttcccaggcttgtacgaaagaggggttctttttgtttttgactaaattatttgatttgatttgatgcttagtgcagagtggccttttttttttccttgttcttaactctcatcatcagtttaatgtaattgtccagttgttttttcttttcagtattcttcctgaactcccagttgttggttataattctcttgatgttataagaacctgaccaaatagtgtaatggctagagatcgtgtctatccctataaaacagagcagtaaatagttgaaggctataatgacaagaattttggtcactaggctgagctttcccaatctttgcctcatgagtacatgttgaaaggaactctgaagccatatgagcatacatgtggagagctttagatcaggccactgtaactcttaataaatgctcagttttctcttgttcatacggtcataactgccaccttccagttacttcatagcatttgaatatcaaaaagccaaacatattcctgttttgtaatgtaaaatatttaaacccacctgtgatcctttcatatattctgcatgtttctgattatgtgaatcatttatgaatctagtatttctacagtggatcgtttatcctaaaattcttattctggtaacttggaaatacaggcattaaatctgtgttaattttctttcaatcactgttctcagtgtgtagacccttactgtagtcctatacctatttaatcggcgacacttgaataatacaattgtgtggttggtaaaaatgaattagggtttcaggattttaccaatgggtgacttttaatattgaatgacatgtattaagacaaatgcttttatatataatttatttggcattgtaaatgcatttatcttgtgagagacagaccccctgttgtcagatgaagtattctggaaaggtttggagtaaataaataataaaactactttgatatacaatctaaccaatattaaatattaagactttcagatgattgattttaatacttaattaacttatttaaagtccaatggagcactcttacattaaagattgacagaatttaaaaatgaaacttcatcctttgtctgtctttctcatctttttttccctctctcatttctcttcctctttctcttatgattaagacactaaaacatcattttccctgaccatcaaatttacttctggctaccagtatttctaaataaaaattttttgtcaattctacaaataatgttccattactgtctaattacaaaaatttagcttctatcagttccttgcctttatagccaagctgtcatattgtaggttataagcccactgtggtaaatgcatgctgcctgtaacggatactcattcatgctctgtcttccctcacccccttttataattgtgctctggtaatagttcatttaagctctttcatatgcttttcttataggagttaactttatgtaaagtaacattactgtcatttcagtgtttgacttctaagcttaccatcagtcaagaatttaaatgaatgaagtatgcttatatgagcttttttgaatatggatgtctttagaagacacgattcagaatactaattctgtgtctctatattagaaacagtaaacgcataaatataagctgaaatacaaagaacttcagattcagagggaataaactattttctagaggttttgtttatgatgccattttaaaagtgaaaattttattcactaacctattttttagctcattttgatgctcacaatatgaagtttatacttatagactgcttgtattacttcactttacatggaaaatatattattttgaaatttcatcaacataatttatctttcaagctttagtgaactcaaccctttcattaaatattaacagttttaacaatacttcctttctttcagatcacttttatcttaagatttaatattgtaacggccagatttatgaagccaatacaacaatccttaagattagtctttgattttcaaatggaagtttcagcgtagtgtgttaatttgtgtgaccagaatggcagttaaagccatgttgtgcagctaagtttgagttttgtgaactttgatttcatgaaaaacagggactttaaatgttatttatattgtaagtgtagcaaagaagagataccttctttctcaagtcttagaaggtattttgctgtgctttctgaattagaaaaaataagactgcccttattttaaaaaattctttaccatttttgtcagctagggaaattctaaagacagtttcagattatttaagaaagttgaaatccatcagttatggattaaagtactcattactaagatgcatacttttggtcattatgtatttctctctctctctctctctctctctctatatatatatatatatatatatatatatgtagcttttggtaaagaatccgcctgccatgcaggagaccccggtgattcctagctcaggaagatcccctggagaagggataggctacccactccagtattcttgggtttccctggtggctcggctggtaaagaatccatccacctgcaatgcgggagacctgggttctatcccagggttgggaagatctcctggaggagggaaaggcaacccactccagtattctggccaggagaattccatgaactgtataatccatggggtcgcaaagagtcagacacgactgaacgactttcactcacttcacttcacttctatatagacaagtttaggacatagcaagtatacaagcataagatgaagtggtccattgtgagtttcaaagtgtttatgccactttgactttgatagtggttgtcttaaaatattctgaaccaaaaaaaaaaaaaagcacccttaattcacttgaattcttcttaaatattttcttgtagtttggtattcacaggtacaaaattataatgtttaaaataaatgcagattacattttttaaaaaatcatttgccatcctgctttgtagtttgtgtatatttttggttgttatagtcacaaaacacaagttggaaaagtcttaagaaaattacttcacatttgaaagcaacatattgtgattttataaggtaatcacagtagcagtagccaacaaaggaatttttattatgttctgaaaagcaaaatagccctttgtgtttaaaataacagtaacaaaaactaaaacaatgccaacttaataagttactcttcaacttgattattatttaaatctgtatttaaaagaaaagtaaaagcattatccaacctttttattcaacaaatttcttaaaaataattcattattactattcagcatgtttccaggtttcttttagtaaaagcatttcagtgactcagtttcaatctgtaggcataataaattagaatatagtcgatacctgatgctatagaatggctgtacaatggtgtattgggtaaattttgtattgtggttactagggttaccacagacatttcaatttctaaagaattattattaaagctgaaatgagtaaatgacttataattaaatttactatagagtttaaaaggccttaaatatcttgcacaccttgagttaatatttgagcatcattatgttgtagagtatcttatttttaatgtgtctttttgaaatgtactttgatatcagtttattggttgtctagttctcatagagtttaaaataaataaaatccccttatttgtatattttaggtatatgaagtctaaaagtagaaaagtgtatatactataaaaatgagaaactagagtaatgatatgaaaacatagtataggatgctaaagaaattttaaggaagtctgccagttaacttgcaatactcattttcaaatgttgaaccttacatgttttaagagtatgacaaaatgtatggagaatacgaattttatgttgtaagatatccatggccaaatacaggtttgagaggtgtttaatcagttccacacagtttttaaaaaaattgtcaaccaacacaagtaaagagatttcacatacaattctggatttttaacttttcttgaaaacattgaaggaaagaaaaggatgtcccaacagttgacagacccggcatcttacactcccttgtttgatgtcttgtcggtctgtctcactgccttagaaccaagggtcttattgaagcagagggtgagccctcgagccagagaggatgggttcaacacttactagctgtgcggctgtaaacaaattgctccatctctctgtatctcattttctgtggtgaaatgagagtaaggatgaagatgtgtcactgagttgttcagcagataaaatgatgaggatacacaaagtgtttagtgccgtttttgccatatatgcattgcttaatgggtgttaactggagttaatagtaatttttacctggccccatgaggtgtttgagcttggtgagacttctccatagtagaggacgttagtttttaaatctgttcattcatttgatgagtagactatgtcagattctgttttataataaaattgctcatttacactccgtgatcctctactagagtatctttcccagaatttcttctgtgtagttcagttgctcagtcgtgtccaactctctacgaccccatgaaccacagcactccaggcctccctgtatattaccagctcccagagcttactcaaactcatgtccattgagtcgatgatgccatccaaccatctcatcctctgtcttccccttctcccaccttcagtctttcccagcatcaggatgttttccaatgagtcagctcttcacatcaggtggccaaagtattggagtttcagcttcaatatcaatccttccaatgaatattcaggattgatctcctttaggatggactggtaggatctccttgccgttcaagggactctcaaaagtcttctagaacaccacaattcaaaagcatcaattcattggtgctcagctttctttatagtccaactctcacatacatgcatgaatactggaaaaaccatagctagactatgatggacctttgttgacaaagtaatgtctctgctttttagtatgcagtctaggttggtcataactttgcttccaaggagtaagcatcttttaatttcatggccgcagtcaccatctgcagtgattttggagccccccaaaataaagtttgtcactgtttccccttctatttggcatgaagtgatgggacaagatgccatgatcttcgttttctgaacgttgatctttaagccaactttttcactctcctctttcactttcattgagaggctctttagttctttgctttctgccataagggtggtgtcctctgcatatctgggattattgatatttctcctagcagtcttgattccagcttgtgcttcatccatcccagcatttctcatgatgtactctgcacagaagttaaataagcagggtgacaatatacagccttgacttactccttttcctatttggaaccagtctgttattccatgtccagttctaactgttgcttcctgacctgcatacaggtttctcaagaggcaggtcaggaggtctggtattcccatctcttgaagaattttccacagtatgtggtgatagtatgtggtgatatgtggcatagtcagtaaagcagaaataggtgttttcctggaactctctagctttcagtcagtgctccatgtatgatgatttgtacacagaagaagcgagaactgacaactgcttagatttatggcttcggggtttatggctttagaagttttcaccgtgttggcaacaaaagttctgctttcccaagtgttgattttgcctaagcctctccttttgttttaaccatagtctgagagggatagggtttgatgacatctaatcaaagtgaaggtgggtgagaattgaagtcttctaataaaagtgagaaaatattcgagtcattttatgaaatgagcatttttgaaatgaagtaagtagaatagaggagtgttttgtgatgggaaaagattggtcaaagatttgtatgctcgtgagcttttctggaattttcctccaggagtggagacttcatcctgtaagatcacatacacattttggctggaccttcttttccaatttaacatttcacgtttcctcttcctttccccctgctctggaaatttaaaatattttgttacttacattagtttggatgaaatttagtgaacttagtctgttttttgaaagatgttgatatgggaaggtcatttgtactgtatagacttaaaaaaaaacaagtagtgtcacttacaagttcaaaaacactttcatttctaaaaagaaaatgtgtttaaattagaattatttataggaatcagacttgagaaggaaaaccttcaaatcaacaaaagaagacagagctggttatttacataatcttgcctttgtaagtgtaacaccggagcagaatccataaagaaaatacagatatttttggcttcataaagatgttactttgtctaggaaattatatataatttgaacatagagatatattgtgaaaaatatatgtagcatatgacaaaggtttaatatccttaatatttaaagcatgcttacaaatcatgagggcaatcatgataataaactccatccacaaaaacaataacaaatgtcagagaaaacatatgaagtcttcagttatcttactagttatcaagcaaatgcagtataaaacttgattatcatattgatcccccccccaaaaaacccgagagattacttatttctactgttgatgagtggccaagggaaatgaattgttctattatattcaaatctgtctagatcataatttgtcaaaacttatcacaaaatgttatattttttaaaaaatacatgctttggttcagtagttatgcttataagaatttatcctgaaggggaataatcatggatacagtacagagatattggtggaagacattcattgtgaggctgtttatagtgttgggcaattgaaagcatcctgattgtttactaataaagaactgtttacgtgaattgttacagctatgtaatagaatacgaggggtccactagaagtgataatgtggactttttaatgggaaggaagatacgataatttatgtaatcagatacttagcacggcggatcccattaaaactgtacatgttttaaatgctcagaacaaagaaagaatacacataataaacttgaaacattaacagtggtgttttcagctaatacaattataaataattagctatattttctatattagttagctgtgttttctatattttgaaagtttttattgtaaatgtgtattattttgccagcaaaatgaaggatattataaatgtgagaatggtttaagttacaattcagctttttgtgcagaagtgtactgcagacatatgtaattgcatgttgaggtaaagattaccagtgaagttcagatttggaaagtaatttttaaaaagaaaatttagtgctactttttcacttctttacatatatgctatggctgccgctgctaagtcgcttcagtcgtgtctgactctgtgtgaccccgtagacggcagcccaccaggctcccctgtccctgagattctccaggcaagaacactggagtgggttgccatttccttctccaatgcatggaagtgaaaagtgaaagtgaagccactcagtcgtgtccgactcttagccaccccatggactgcagcccaccaggctcctccacccatgggattttccaggccagagcactggagtggggtgccattgccttctccatatatcctactagtgtgtgttaaaagtccctggatcctggagaaagcttgttaatgtttgtaatgctcacttaatcatttcaggtttgcatttattcctagtcaaggcaggaagaggagtatcatttttctccatatttttcatcttccaggtgggcgcttttggtgacactgtccagttctcacaatgtaccattccttgtctgaaactagacatcctctgcagccagaagaacaagaagtgggcactgaccccttgtcaagttactcagacaagcctggaggtgagtttcctgcgtggataactgctgagctgctgggacagttggcagagtgtctccagctagccctgccctagatgtcttcctctagatgaggctgcaatggagaacttttaagaccattttgctggatagatgtggagtgctgtgccactgagtgtcaacttttaattgtagccagacacgttagctgtagccaatgtttaatgcactgtcattcttaaaaaaaaattcataaacagttcattacttcaggataagaattttgaaatacaaaatggtctatgtcaaacatcttttaaagatgtctaaacctttggtgttcatttttgtggggatttttcttctttcagcaaggggagattattatagggtaaacgactttcctgattcttctcttttttttaataattgaaatttgtgtttttcttttaaatatctatgtatggaagttattaagggatcaactatgtttgggcctaccctagaaaagtgtattaaatgtgtatgtattggagccttatagtattttctcaatattaacgatagcatagtatcttagaaggaaacagtacatttgtgacaattcttgaagctttatccttatttcaactaaatatttgctgaagtcgattcatgattcaagtaactacttgtaatttttcactcatacctatagcaggattgtaagatctattttaagaaattacaattagtcagtcattcacatatgttttctgtaatgcaaatagagatttttttccccctatattgatgtaaaggtctgcagtaagtaatgttttgggaattaaaaaaagttgattcctaaacataactatttctttagtacacaaactcttgagtttatggagtgtgtatatgtttttttgtccatctttaatacattccacatcatacaaatgcccttgtgtttaatgaaaatagtgtgcagcttgttttcatgattttatttttatatttgcttctatttagactgctatttaaggttttgatagtatgaaaaaaatgttagtgtttagtttcagcatttaaagaattttagtggtgagagcgatacagtcatccctagtgatccctttttcttaaatgtcgtccctttaagaagtagagttttaatttagaaagtcagattagtctgcagtcacttccataagtgcatatttcaaaagtgaatacatttttgtgttatcaatatataaaatattttcaccaaaatattctggtttatatgcttatttttgactaaacatttttttagtgtgtatttttctctggactagttcattaaatattgaagttcattttttaaaaactggttaagaaaacatttaaattaattttatcctttattgtttgcagcaataaggtgttacctttactgaaaaggcttttcgtttatatcctagccaacatttctatgacatacaaagttattaggactgaattgatgtttaaaagtgccattaattcatttaccccaaatgttcattaacaatgtaaatgtatgctgatgttctatgagacaaggaagtgactaatgactcttccaactaacaacacttaaaatgaatagaaactttagatagctaatcttgaagtaatcaagaccctcattcagcttggcatctctgtatgctctaaaacagctgtcaactgttaaaaatatacacaaaacacacacaagcgcacgcacacgcaaaagaaagatatgtaaatatctggttctttagagccagaaaggttcctaagcgtggtgggtttgtgcattgtatatgtgaatattttctataaagcgtctatttcgtctcaggttttctttctgcaggacactgtgtgttgcattttaatggggtcgtcatatttccttgaaaaatcatcacctgtttagtgtgttggtttattttagtatatgtctttcatggagttctccacacgtttgaagccatttacactttacccacaagggaatttgtggcaactagatgactcatttcgtaagtagtcagatactggacttaatcagtgttttctctgtgtaaaaaccatgttttttgttgacttgaaaaaaattccttttgcatattccagaagtaaacaaataagtctttaatttctgaaacctgaatttttatatttacacaaatatactacatttctgagttaaatggttctgcgtattctggaaaggattagcaaaaatagccgcataacagataagacagagagaaagttacatatcattggtttactttcatggatgtttgagggaagtgagtgagggcaggaaaaaaaagtatttgcatacactactctacatgcaaaatcttagggcacattttccatgttaattcaacttttaaatgcttgaatttctctttcaaattgaaaacaccacagaaagtatgatattttctctgttgaatttggttatgtaccaaaattatcatcttaaacttcaagatctttgatcaaaaggtattactaattgacaagttacctataattcagtttaaaccataaaaaaacttattttttcagctattcatgattattcagtcctagcatgtaactaacttttaatgatttaattaaatgaaaaagtaatcattttaaactaaaaacaacaaatatgaagatttacggaaacttaacctattactactaatgaaataacattatcagaatcactagtttttttccaagcttataggagattggaatgttactcatgatgagaaaacattttcctcttttaggtctctcttgagaattacagtttgttacatatagccagagtttttagctctaattttatatgccttcttacttaacagcttttatagtattcagataattacttaatgtaatacctttttatgtaatatctgtttcaaagctttctttttggctcttgtatcaaatccttagtaacctacttgaaaaatatctaagacattcggaatatcctgcctacttcatttttgcctctttgcaatttttttgtcccaagtcttcctttcttttggtttattatatcatagaatttcatggctgaaaatgggtgcctggctttattggtgaataaattggggtgataaaatcagtttaccgtagttgatgtgagaaaacgatgtggtcctcttgccatctttagtgtggctttccaggtcctagaggcatcactgaactcaggtttgggtgcttgccacttgaaacgtccacagccatgtgacgtgggctgcccgtccagcgcccagggagaaggtgggctagtgtcccagaagcaaccccgaaggctctgctcggctgccgccgtccgccacgtgggcaggctgttggcgccgcctcatctccctcctcactcagtctctgtggtgcaattagtgaaggggaggctgggagggagatctggcgatctctcaactccttcttcatttcttctttgatctgtaaagtaccaacatgctaggcaaaatattatgtaatcagaatatttgaaaagtgtgcttaggccagaggataggtaaaatgtagctttattaaagtgacaagagtggtcccttgcagagagctacttcctacaataaactacctgtaaacatgctgcttacgcatcacccctctcagacatcattccatttctatgggattatgaacaaagatcctttttcttaacgtggaagatgctgacggtctgtagcgtctctttgttgatagtttccgttgcctggctgtgtatatgggcacagcaagccacaattactttgatgcccacaaagatactcatacagttgatagtgttaatcctcctctgtttaagtccaggtcttataagtgtgctagtcatggaatcaggattactcaggacggagcagcctgtgtcttgactacagttgggtcaccctgtggttggcttttcccctctgatggcagttacagtacctgtaaagccactcaggagtgttcatcagaccctgaaagaccctgtgcctctgtcgtcttaatcattgactacgtgagcctactcttttgtgacccagggagacttgggacattttagttattctacaaacaggaggcagtgggtgaggggggaaccttgtacttgggacaggactggcagggttccgcttggtttcagatgcagtctagagcggagatggatttgtacagaggggcagggtgttcttattctcactgtaatagcaggaaggatggagaaacggtatttcggtgcggtccattcatctgtttgatggcagagagtaaaataaagtatcactgatactttaatatctttcttgatatcttagggtgaggtaatttgctgatagtgagttaagatgaagcatttgaagatttggggagagtaaaaaaggttagattgagttggtaaagaatgtataaccttggggaccaaggtgagtttaaacataatttataggtgatacaaacttgtaaatgtgtatgattgtatccagcagaattcagttcctaggacttagccacaacgaaaagcagatggttgctttgtcaggggagtataacaggtagacaagtggacaaggaagtttatggtggaagaattcatggatggatttgagaatagaaagaagtttgctgttacggaaagagggcagagttatgagagggcagggtagaacgtttcgggagggagcgagttaggagaggcgcagtggaggattgcagggcggttgggaggcgcagaagcgtggggcagcgcgtccagcggtggtgactggtgagtcagtggagcagtgttcagcgacagccagctcacctgcgccgcaccttcgttagttctctgcggtaatgtaggtctcattgatttggacaggttttggtttgaagtcttcttcttattattccaaagactcttttaaagagcagttatagcttcacagcaaaattcagagaaaggtacagatttcccacatagcctctgctcccacatgtgcgcagcccctgtcttacctgtgtctgccgccagagcggtgcttttgtgacagcagatgagcctacactgccccttgctcggcagtttaccttgggacccactcttggtggtggacactctgcaagactggacaggtgcgtaaagacgcgggtctgcccaagcagtgtcacgcaggagtatctctgcaacattctctgtgcttctccctgtccatcttccccatcctttgctcctcaacctctggcagacactgatctttgtactgtctgtgaagttttgtaaaaagtatcatcttaatgaagaattctctgtggattttgaggagaacaacagtttagatagatgaagaactgttagtaagactgttaaatcattaaggaaaatggtggctttgttgaagatacagattactaaataagtgggagagtgacttggaagttcctaaatgacagtaacaaggatttttaaaatgaatggttttaaacatctccttaacaatggcctttgtgaagcggtgtgacggcaggtagaggtggccttcaagggccgtgtccgtgccgtgccctgtccctgtaagtcgcagcgtccagaagaaggctgggaacagggggcttcagcgagaaaggctgcgcgttaggggcgtgaaggccatcccccagcgaaaccagatcagatatgaggctgccagggaacaaagagaggagaaaagaatggggattgatcggtcagaatttctcatgagcagaagtggagagaaggagcggtatttgacaggagtcaagtagaggggaagcgaaggaggggccaagattatcgaagctgcagatgagagagctccccgcggcccagcgcggccagcgcctcagcaccgcctggctacaggctcttaggaggagacagtctctgatgggaaaagggttgatgacctgaaattagtgggcaggtattttcaagatactgctcactgacttgagcgggtagaagggaacccaagatctaatccagaattaacctgaagatgtagtgttgaatatcagtggtaaacatttacatggcagcaaagttcaacttgctctctaatgttagatttagatgattatatgtagattttctgtattcatgctctcatagtgaattgagatttagcaagttagacattttaatgataacaatgaaattcactgttagtaaaatgaactcttgaaagtaaaagaaatgttaaacgtttgtttatctatgctcggctgtgccgagcctttgttgctatgcggctgctctctagtctggtgctaaggcttttccctgtggcagcttctcttggtgtggaacacggcgtttaggcgcctgggcttcactggccgtggttcctgggcccgagcgcacaggccaagcagggatcgagcctgtgtcttctgccctggcaggaggatgctttaccactgagccaccagagaagccccatgtactcttgaaattaaaaaaaaaaaaaaaaaaattggtatgaattttgagctctttctattgatttgtgtattccttagtatttgaattcagtttttagttttatttgaacttttctgttggtgtagcaattccctgtattaagagagaggctccttttcagttccttcagcattcggattttgtgaagagtcattttagttgtcccggaactttttttcatttttgttgtcttaagagtttaagtttttccagtggtcatgcatggttttccagtggtcatgtatggatgtgagagttggactgtaaagagatctgagcaccaaagaattaacgcttttgaactgtgctgttgcagaagactttttcttgagagtcctttggactgcaaggagatccagccagtccatcctaaaggaaagcagtcctgaatattcatcggaaggacttatgttgaagctaaagctcaaatagttcggccacctaatggaaagaactgactcattggaaaaggccctgatgctgggaaagattgaaggcaggaggagaaggggacagcagaggatgacacggttggatggcatcaccgatttgatggacatgagtttgagcaagcgctgggagtttgtgaaggacagggaggcctcgtgtgctgcagtccatggggtcgcagagagtcagacacaactgagtggctgaagagcaaaggagacctccctgctcgccctggtggcagaaagacccagtagccctgcccactgcccctgtgggcagaggtgtccactgaggagaactccctgctcgccctggtggcagaaagacccagcagccctgcccactgcccctgtgggcagaggcatccgctgaggagacctccctgcttgccctggtggcagaaagacccagcagccctgcccactgcccctgtgggcagaggtgtccgctgaggagacctccctgctcgccctggtggcagaaagacctagcagctctgcccactgcccctgtgggcagaggcgtccgctgaggagcagccacactttgagagactttgtcgtgatgctcagtcaacctttccaacattccttggtccccaaaagtgagaagctatgtgatgggtggttttgtttggctgggtccgggcatgactagagtgatagaggtgattctgtgcaacagtattctcttaaaaccttggaaaaatgtaaaccaaagagacgcgctgagatgaagtgacctccagtggctttcttatcaaagaattgcgctagtggctttctgctagttcatcagtgggaccagaaaaccagtagaatagagagcatggctaactttgaccaagcttagaacactagtaacagtttgcatctttaattagacttgtgaatacatctgttttgctgaacttagattttcaatcagaaatggtgacataatggttaagaagtttcagttatactcagtaaatgaatagagatcatagagacacacatatttttatcatacctggtatgggctgcaggccacaaacctgatatttattcattcattcattcaaaaaagtggttgatcatctagtatctggggagagactgctaaacaaatggtccaggtgctctctttcaatgaaattaacattttcgcatgagagagacagttaaaaaagaagaaaaaaggtgggaaagtacagaaatgagaaaaagtatcagaatgatgagtgctaggcaacggttagagtggtagtctaatgaacggctgggtacagactgcagattttcagagcagcgccctctgagaaggcgattggtcagtgacatgagaatgacagacagcaaggagccaggcatgcggagatggtgacgggggcgaggggcgggcacatggcacagagagaagcagcagggaaggagacagctcatggagcgggagttcttacggggcgggggcggggggtactcctgtcctgttcagggtgtctgcagatggctggggcaccgtgggggtcgtgcaggcgggtctagcaggggctcacctcggggctgttagccagtgtggatggtgttctgaagactaaagtttatttagcgtctgtattgttctctctgttgtactcttaaatctcttttcaagaatgagggccgtaactttttttattatgtatccttatgacttgatactaagcatttattaagtaatgcctgatttacacagagttgtatttttaaatttattttcatatttagtcgtctatgctgatctttatttcctcacgctcaatattttaactctgtaatagtgaagtaatttctgcttaacctgagataaaagaatgtcatagaattaaccatttatctaaagctcagttactactatgtgatctgttttatgccatgctactaatattaaaatagtaacaataaaggctgtcttgataagaccttttctgcttgacccattgtgtacgccatgtgtaggagactttggtgggtggtgcaaataatctttattttctctttgctgaagtaatggaaaatttgttcctctaggacatattagaacaatgtatttaatgctcttcaatttaatttgctagtatcacaattaatacaattaaggtcacttgaaatgaaactattaacaaattggctaatttactttaacaacgtcaatgtgttctcacaattacatttgctttaattagtgcacaagctattatttaatagcatacttcacacagaaaaatgtaataatgcattcttggctccttatagcagaaaggaagaaacttttaatgggctgagtgattttgtggaattgctgctagataaaaagtgatggaagagaaagcacaaagccagaaagcaaagcctgtaagatgtaaataaaacaaataccttttggcacttaccaacgcatgtcctatttatcattgtgtaaatagtatcagaaacttttaattaccatttaaaaataaaagaacatgggtccttgaaagttttgtgttcagttttatccagtttttgcttaatactgaagtaatgtttcacttcttgaatagcataagtagttaagttaattactagttaaattattatcattattgcaagttaattaataaaataattaatcatgctaataggaacagaatggtgtggcatataaaaaaagtaggaagccaaaatgtgtttgaattctcagtttgacttttattttctattttgacatggatatttcttaatgaagagttcacttttctatctggcctactctaaatgttgagatcagaagactcggggaggaataactggttgtttctgtttctatatatgcagagtaagcaaaggagatgaatggtcaaccaagccataattaataatatttgctcttctccataaacctgagaacaagatttactatcatataatcagtggtgattttatgtgcaagggggataaaagcagtccagataattcaatactgtaatttaaaaaattagtttgacagtctttttgcctaatttgattgatgaatgtttctattgtttttatcttctttcctttcattctttgcttaatgacagaaattcctaaagttgcaaataaaaaaagaaaataggcagaagattaattagctagtaaatatttaaatataaaatgcaagaagcttggggaatctagactttaaaaaattaaatgtatctctcatttctaggaaagaggttcataggagtatatttagttttctagtgcttgagactcttgatgcaatccatggactctcattttatgccctaaattttgaattcagtctaccagggcattcacagatcagatgggtcaaaatagagtaatttacaagaagaacagtctacttagcaatagtagaaaattagttaggtgattctttaaatagcattttgagttttgcaggggtagactgctgcttttagttagttgctatatgtactacacaccgggcttccctggtagttcagttggtaaagaatactcctgaaatgcaggagacttcagttcgattccttggttggcaagatctgctggagaagggagaggctacccactccagtattgttgggcttccctggtggctcagctggtaaagaatctgcctgccatgctggagacctgggttcaatccttgggttgggaagatcccctgtagaagagaaaggctacccactccagtattctggcctggagaattccatggactatacagaccatggagtcacaaagagctggacatgactaagcgactttcactcactacacagtaagcagttctcatttgattcttactatacatggtctctaaattctatcttgacttttaatagttgttttaaattatttgtctattgagtccttaacctacattatagactattagaatagtaaccataatctgattatttaaatacttgctctttaaaatgtaaaggatttaaaaataagacatctattcgctttctcaaaggagtccaaatgcaagaagttaattagcttcttgctttcttccaaatctcgcctgcacatagtcttcattcttagttccttttttatcttgtaagtaagaaattgccccaaacctggtggggtgtttttttttgtttttgttttttgtttttttttttggctgcgagatcatggcagtgaaagtgctgagtcctaaccactaactggactgcaagagaatccccccaaaactttttgaaagaaaataatatgcctttaaagtgtttattcagtgtcaggtctcaggattaattgttgcatgccaagattatagcatttcagaagcaccttatgagtagcctgtgggggccttttttttttcttatgaagtgatattgaaagaaagttcttaaagaggctaaaagaactttgcagcctggttttctgcatttgtttaatcactttccagtgtaaaactacacaggatttctctcttcaagtccaccacccagaatagacaatacaacattgaaggagaacaaaattagaagactgacaatgtctgacttcagaatagagaggacagaaagacccatacaaatagagttaagtgattgatactgacaaagaagcaaagccaattaaaaaaaaatctagacattgattttatacctttcagaaacagttaactcaaagtggatcatcaacctaaatgtaaaactataaaactcctagaaaatgacataggtgaaagtcttcatgatcttgtattttgtgatgacattttagtttcaaaaccaaaagcatgatcaatgaagaaaaaattgataagttgggtttcattagaattaaaaccttttttttctctttgaaagacattaaagggactgaaaggcaagccagagactggcagaaaattgtttacaaaaattatctgataaacgctggtatctaaaccaaacaaatttaattacccagaaataagaaaacaaaaacccagtagttaaaaaatggagagaatatctgagcagaatataccgatgagcagaggagaagatgatccacgtcacaggtccccagagaatcgctgattaaagtgagacagcagtgcacggctacgggaatgaccgaggtccagacactggtgccccgtgccggggggcagcgcagcagcaggatcacttgctcagagctgctgggcacacagagcggcaccgccagttcagaggacggtgtgacctccgcttacaaaactagacctactctctgtgtgatctagcagttgcactccttggtatttacccaaatgaattgtctaaacataaaccatcacacagtgtttctagcagctttagtggtgattgccaaaactggaagcaacccggatggccttcagtcggtgaatggatgaacaaagtggtatgtgcatacaatgtcatcattattaggtgacgagactgaaaaaatggtccgtgcatacagtggcatcattattaggtgccgagactgaaaaagtggtaactgcatacagtggcatcattatcaggtgacgagactgaaggggccttcaggttgtagcaggacaagcgggaacctgaggtgcgtgttactaagtgaaagaaggcagagtctgagcccaacgctctgatctggtaaaggcagtgccatgaagccagtaagaggatcggtgacggggagggcttaggcaagagggaggggtggataggcagagcacagaggctctttagggccacgacgctgttccctctgctgcagagagacagcagcaagaccagcagtgtgttcggacatggacacgagagtcacagatctcacaatgcctttaaaactggtaggcctgtctctttaacactagaagcactatatatatatcagtataagtgatatacatctcaatttactttgttttctttcattattaaaaggtgatgggaatagtcatatcatacttgaaaatttatcagaattgatctatatactctaacgtaactcgcaactttttatgttgctcatatttcttttaagttattttgtattgctgtccagtcattttgcacatgtgaagaactgacacagtattctctttgattttgttaaggacatgcagttgggttaatgtgggtacctcattcctctcctcctcctctttgtgcgagtacagagaccctgtgttggatcctctgatttcactggggaaggttgattcagcctatagaagcttgtgtactcagtgttacttgttatcctagttaaatgacccccacggtgctgggaggagcacaagggttatatctgaaccagaagtgggggactttctgtcagttgctggatttgttcctgatcagtttgttcctgaagttttagttctacttacaatgtagtataacctaagttatcttatcttttgatggagccttatgattagatgtctcccaattatgacgtcaagaatgtggcagatttcatacttagaaatagcatcgcatgccatattgtgttgagaagtccattcctgcccttaaggatgaaacctgaagctgttgtagcctggctttctgtcaaggctgctgtcttaaccgtacccagctctttcttgctggactcacttcgactctggtcattccctcacgtcagctgctcctcagtggagatgctttatccaccgtgctcttggttgggaacctctttttctcttataccagggtgcattgatgagagtaaaacatcaccactgaggtgaaagtctttgcttgttttccatctgagagcagtattagaagtccacgcactccagatgattcacagattactgttaggggtaaagggaagactgcctaatgtacttttcctgatacttggaggattgtctccaatctgtgcctattaagggcagtttccgcaatcagttatctgatagcttttgagaaaaacttctgaagatacaattatggttgtcatattcaggcagctatatttaatagttaatgtaatcttattttaaaaatgtatattggatgggtcaaaacggccagtagacagtatttagtttttagtcattatgaggttaaattactttttgcatctgtcaggcatattttaatagtcctttatgtacatttaattaattgcatgttaaaatcaacatgacaagtaacttagtaacaagttaaaaataaatcttttgtcttgttaatcaaacttcacacaaaaatgtagtaattaaatatttgacatatttatgcttttaatgatttcagtatggggttaatttgatacatgtgaacactgttaactatacagttcatacatgagttttgaaattatttgtgtaatagaatcattgagatgcttttatattgcatttaaaagcttagtaaagtttttaaaatagtaaaatagtgttttatactactagtaaatagtaaagtctgcttgtgaacagatcggaactgaacagaaattctgttcagtaactggattggccagtcaaatgtacaggtttgagttttctgttcaagccacaaaaaaaaaagtaattgatttgagccattttatcttattgccaaggcaatataagtaggtttcatttaaaccttttatataatcaaatacatggaagcaattaagtttggaaacctggggtctaccaggagcttcttggaaggggaggaatggagacttttaaatggttgttaatggcaatttatagaatttctctgtaccaacttgcagtgcttaatataggctatatgattttagagatggctgttacattaaacctctctccaaagactgagaggtgctatttttatgaacatctaggcaagggactaagtgagttcagatgcctggcttgagtaatgaaaacaccaacaagcatttacatacttggtttaatttcttgccattaacacacacatacatacatacacacacacagattaggggtatatttatgcacaatctggccttttaacaaagaaaaataagcctatgtttaggctgccactgctatgaacaaaacagctgagattttaatgaacaccatactgagggcatgtaggacataaggcgaattaagcaggttacaaactgcacatcttctgtttagatagaagagatctccccagccctgacagtcagttgtactgacaaggcaagcggatagacagagacagaaggagatcatttgtatcaatttgagaaatagagctagtagtgaaacaaactagctgctcaaaatagcctcacttttaatgttaaaattactctttctctattttcccccaaaataaatacttatggttaaacaaaaccttattttattttgtttataaatgaagacaacattgtttttatttttattttattttaagaggagattttctggacactcaaacaaattttaatcttggtaacctgacagctttgtttaaacactgaatatgagtttcctttcatgaaaatcttttcagagtatagcagttcagctgtgaaagcctgaatacattaatgatgacaaagaagctccagaatgagccaacatttgttttgttcttttacaatatttcttgataaattgcataaacaaaagtgttgcagggttattttaaaattttcctgtttctttgctaataaatgtctttgtgtttactttttagatatattaccttattattaatcactttattttttaaacaaagtgactttaagaagtccttttttaaaaaatgtgacttaaaagtacatattatagggaactctttaacgttgcctttcatgtatgtggttaaatatcaaaatgcattattcatatagacttgataattttcttgaaaagtaaacctcttccaaataccagacaattgtgttctgaaggtgtttatttaagatcatttacttgatatcttaaatgattaaagaagatgagtcatttgcaaagaaagcaatattataatattttagtgtaatgctctttttaagggtcgcagtttgcttatttaacagtcattcttatgaagagtgatactgttaatctttctgaaataaacgtttcttattgagaaatttttattttttaatttgcatatgtgtgtcctaattcgtttcaaagttttgaggcatgatttgagacatagtctgagaagattagcttttcttttttgatttttaaagttctaatgtttttctattctgtttacaaaatacttttcttaaaagcatattgtaaaacttttgcaattttagaattagtttctaaaaaattccttgaactactttttgatgtattttgcgctgagagattgagcatgtttccaaatggtacgtagctgagctcagtaactaaaatgagcggtgttggtcacttatatgtttggtatgcactgagccatttggttcatcttatttgtcagtcggctatcagtttgctacataacaaaccatccctaaactcagttctgtaaaacaaaagtgtttatgattgctaatgagaaagtgcctaagcctgggaattctcttgctatgggctgaccttgctttatgtgtttggggaatggctggtccagactggcctcacttgggtgtctgagattggatgacaggtgacatgatagagtgactgagtcacatgtttcatccttcagtagtccagccatcatgcacgtactggcggtgtcagcattcgtgaggacagacagaaactgcagggttttgtgagaaccaggcttattactggctctgagaaacctccacagccttctgttggccacagcaagtaacagtgccagccgcaatagagcaacaacaaaaccgcatttctgtagactagcaatgaacaacctgaccgtcatttaaagcccagagtctattcacagcagcactaaagagttacatactcaggagtgtgtgcgacaaaacactactgtaaggaagtgtaaacatggagagaaacctggtatgcatggataagcaacacattattgttacgatgccactgcctctcgatggaagggtctggaaaaccacatcataagaggcgtgcaataatcaggatcatttacaccaccagtttgctatagatgctgaagcaaagatgtaagtaagcagttatacaagtattttatgttaacaagaaccagtccaaaaagagtagtgtgacagaaaagaattaactgcaaatctagaactattgactgaaaaataatagaagaagtaagagagctcaaataagagaactcaaagatatttcattgggaaataaggaaacattatagtttcctgtatttctgtaattattactgtaaaaatactttacatgtgaaatgagttaataagatctttaaatgaaatttttaaacaagtgtttaaattttgtcaatttccagaaagattctttgaacgtggaaaatatctttctaaaatttattcagaattatatgctgattaaaaagcaagaaaatatagtaaaaatttttacggtaacaaatttgaaaactaaaacaaagtggaaaaatttgtattccaagagaataacagagactaaagacagttaagtacatttacatagaatactaagtactttgtaaagctagggaacactcattgcctactgagttgtatttcacacatgaaaaactatggctacaaaaatatgtcatgtacaaagagtttatttgaaaatgggaaaaattatttgtcagagtgatttttataaatacacacacctgtattttgtggatcacaaacgttgtaagaaaaaaaatcttggtgaagccataataaactattaatataatggaaaaaatacttaatcatatctcacagagaaaacgctagtcccaatttggagacagatgattactaaaacaacaacaacaacaacaattttgctctcattaaaagttctttcagagaattgaaacatagggaatgttttcacattcatatcacacggctaatataacagtatcagacaagggctttatgagaaaatacaagctattcttgtgcatgaatatcatacaaataaaataccggtgaactgaatggaacaatacgtaaaaggataacacatcttatcaaatcttgtctgccctgggaatgtaaggtttgttccttacaaaaattttttaagtcattcaacttattaacaaaataaagaagaaggtcatttcagtagatacagagaaactattgcccgcatttcctggtggctcagatggtgatgaagtcttcctgcaatgcgggagacttggtgttcaggcccttggttagaaagatccacaggagaggggaatgacaacccattgcagtcttcttacctggaggatcccatgactagaggggttgggcgggctacagtccatattataaaaagaatattgcttagcaaattttgaatagaaaataaaacttccatactatgaagaagagcaggtataaaagaaccatagcaaaaccatcctcagtgatggaatagttaaaatgttctctttaagaatgggaacaagataagaatctatagataaactattggaattaacaacttattttacaaatattccctgatataaaattaacatgcaatatcacttgcacttagaaatacacaagtaataaagtgttttgtagtataaaaaaatgaacatccttgaataaattcaataaaaatatgatagcttttatggagaatattatgaacctttatggaaagacatgtaagacctggataaatacagagattgtggaagggatagctcattgtcacagagctagtaagttgttttcaagttgatacatagattcagtgtacttttaagtcaaaatttcatcagtgttttttgagtaactttgggtctgattctgatacgtacatacaggaaggaaaggttcaatagctaagacacttctgaagaacaaaggtgtactgtgtaacaaggaaatatggtaatggcttgacaaatagaccaatacaaagaacagaaagtcagataggcccccacatatattaaaatctaatacatggcaaaactggcattgcagatcagtggtaaagaatgggcttatcattaaatggtgctgaagacaactgattttccatatggggggaaatgagaatgaatctctttttcacgacttatgggaaatactagtttctcccaaattatgattatactttaagcagcaaaatatttaagacaaaagacaattatgtagaattagattgagtttgtcaagaaattctttccaaagatatcataaagaaagtgaaaacacaagctacaatctggggaaagataacaatataaaaaaaaaattaacaaaagcttgatatccaacatatagaaagaatttctgtttattactaagtaaatgacatgaacaggcatacattctgtacaaaaggaaatatataatggccataaatgtaaggaaaacctaaacaacatctcagattgtgtattagatttttttcccccaaactctaagccttaactatcattggtctattctccatcatgatagttttgtcacttaaagaattttatataagtgaaatcgtgtagagtataacactttttcattggctttcttattcacaaacttcagatctaagttgttgcgtatgttggataaacagtagttgttcctttctattgcagaatggaattcctttgtgtgaatgtgctatagcttattctcttatgaaggacatttgggtggcttacagattttagcggtcactgacaaagctacacggagcatttgtgttcagggttttgtgtggatctacgtcttgctgacctgtgttccgagtagttctactgttttacttttccatcagcaacatgtgaaaactccagttgctcggcatcctcaccaggattatattgtcaggaattttttacccattctaataaggatgtaatagtattaacttgtggtttaattttttgaaaagaccctgatgctgggaaagattgaaggtgggaggagaaggggttgacagagaatgagatggttggatggcatcaccgactcgatggtcatgagtttgagagttggtgaaggacagggggcctggcgtgctgcagtccgtggggttgcagagagtcggacacagctgagcgactgaactgaatggctaatggtgttgaacattttttcatgtgtgcatttaccatctatatcctctttggtaaagtgtttgttcagcttgtttgccaaattggattttttttttttactgttgagtttagagaattctttttatattctagatacaagtactttgtcagatatgtgacctgctcatattttttcctcatctctggcctgtcttttcatcccttctaacagactctttcacagaggaatttgttttattttgctgtatttttccattgatgaaatatgcttttggtgttacatataaaactcatgttagatagtgaaagtgaaagtctcagttgtgtctgattctttgcaaccccttggactatacagtccatggaattctccaggctaaatactggagtggttatcccttctccaacggatcttcctaggaattgaacggggtctcccgctttgcaggtggattctttaccaactgagctatgagggaaaccccatgtcagataactctttgcctaaccctaggtcatgatgattttgttcttctgaaagttttatattttacatttagattcatgagccatttatttttatttttgtataagacatgagatttattagttcagtcactcagtcatgtccaactcttagcgacaccatgaaccacagcacgccaggcctccctgtccatcaccaactcccggagtccacccaaacccacgtccattgagttggtgatgccatccaaccatctcatcctttgtcgcccccttttctcaacctgccctcaatctttcccagcgtcagggtcttttcaaatgagtcagctcttcgcatcaggtggccaaagtattggagtttcagcttcagcatcagtccttccagtgaacacccaggactgatctcctttaggatggactggttggatctccttgcagtccaagggactctcaagagtcttctccaacaccacagttcaaaagcatcagttcttctgagctcagctttctttatagtccagctctcacatccatatatgactactggaaaaaccatagccttgactagatggacctttgttgacaaggtaatgtctctgattttaatatgctgtctaggttagtcataactttccttccaaagagtaagtgtcttttaatttcatggctgcagtcacctcagcataataaagcctatatatgacagagctacagttacattcatactcaatgatgaaaaaaagctgaaggcatatcctctaagatcaggaataagataaggatgtccactctcaccacttttgtttgacatatttttggaagtcctagccacaggaatcagagaaaataaaagaaataccagaaaactatagagctcattgtagaatacaaaattaatacacaaaaatctcttgcatttctatacactaatgatgaaaaattggaaagaaattaaggaaacaatcccatttaccatcattgtagaaagaatatctaggaataaatctacctaaggaggcagaagtcctgccctctatacgacactggtgaaggaaaccagcgctgacagatggagagacacactgtgccctcggactggaatagtcagcatcgtcaaagtggctgcttacccaaggcagtccccatcagattacccacagcatttctcacagaactttaacaaaatgtttaaaagtttgtattgtaacacaaaagacccaaagagctgaataaggatatatttgggggatgagcagaaaaaactatttattgatgaattgacagggcagttagcgtgagagaggaattcagaaaaattcctagatttctgtcttgggtaactgattagataattctaaatactgatatgttggaaactgagggaaaataaagtttgagagaatgggagttgggagtataaatcaaaaatttttgttgtcctgtgtcataacattcgaggtatatggtagataatcttgggcagatgttccctgaacagatgtgagtcagacagtgtgcgaatgcagtctggaggtacagatttgggtcatatcagcacgaggatgatgttggatttgcgagtatgcaaatattggtggggagtggaaattcaagacatgaacctctacaggtggtggataaatgtttgataccctcaatggggattctgaaaaattcataaaagttataaacgtaatagggtaatagccaaagaacataaacaggcaattctcaaaaagtatttagtattttagataattattagtatgttcactaattatttgcagaatgacctcattttccaaattagaatgacattaagccaagataattttttttaacaaattgtcaaagatttgaaatattataaaagatattgcctgaggtctagagagatggacattttcaaaatggaagtcagttgggcagtatttatcagaggtctaaatttgttcttatcaattaaccttattgtttaatttattttctgtttttgaaatcctgtgataattttcctgttctctgtggatttttactttctctgtcaacagtgcatcaaaatagattagactatgaatagctggttcaatgtcagggtcctactcatctgaggttctaagtgcgccttctaaagactggaatagctctttgcgtgctgttcactctgtgctggtcttcgtttctttcacatacctttcagcttctttctcccagtggatgatggacggttgtccacaggacagaggaacttataataaactttgaaatgttcacttttacagacattgtgcccttaaaaaaattatatattgaaatctgaacccccaatgtggtggtattagtatgtgtggcctttgggacatgattaggttatgagggtagagcccttttgaatgggattgctgctcctaagtcacttcatttgtgtccgactctgtgtgaccccatagacggcagctcagcaggctcctccgtccatgggattagtacccttgtaaaagggacccctgggagctttctccctctcttcataccatgtgaagacagtatttactgtggaagccaccaggtctgtggtatttttcttttagcagcccaaattgactaagacattctctttttaaatgaattaaataagaagcagtatatggtttccctgtttagcccaaaggagaacaaagatatgatgaaacttctccttcagcaaacatacataaactcagattatgacagagctttttaactcagtaagtgctgtaactcagaaatttgttttgatgaatagttagtgttccaggaaaccatttgctaatgtaactcagtctatactgtattcctaaaaactaaaggagagcaccagtttttacccaatggttattgactctgcctatgtgtagtttactataaataaagtctctcttcttatctcttaatttcctgtctcttcaccattattaggtgcattctttaacagggtaacatcctgtttggaaattacgcctggtgtaaaagtgaagctgatgagttcttccccttgtgagacataagcctatgtttgttccaacatgtattataagtaggtgaaagcagcatctctttaagagagtcaaataagatttgattacaagagtagacttagccagcgcatgtgtttttgtctttttacaaaagttgtacttttctctactttgtaaataaaaaaatataacctctagtcagtaaaaaaagctataaacctgtccatcagtagacatttccaccttaaagtaaactaaattctcatcgaattggatttagtgactcatggctagaacagatgttatcttaatggaggagagaagaagaaaattatgtcatgagccacagttcagttcagtcactcagttgtgtttgactcttttccagcccatgaatcgcagcacgccaggcctccctgtccatcaccatctcccggagttcactcaaactcatgtccatcgagtcagggatgccatccagccatctcatcctctgtcgttcccttctcctcctgcccccaatccttcccagcatcagagtcttttccaatgagtcaactcttcacatgaggtggccaaagtactgaagtttcagcttcaacatcagtccttccaaagaacacccaggactgatctcctttaggatggactggttggatctccttgcagtccaagggactcaagagtcttctccaacaccacagtgcaaacgcatcaattctttggcgctcagctttcttcacagtccaactctcacatccatacatgaccactggaaaaaccatagccttgactagagggacctttgttggcaaagtaatgtctctgcttttgaatatgctatctaggttggtcatacctttccttccaaggagtaagcatcttttaatttcatggctgcagtcaccatctgcagtgattttggagccccaaaaaataaagtctgacactgtttccactgtttccccatctatttccgatgaagtgatgggaccagatgccatgattttcattttctgaatgatgagccacagaggcacttccaaattatattcattgtcagtacaagaaaagttcaaaactctacttgctaccatttgctaggaatgtaccagaattcagtgttttatacttttatatataaaaatatacatgctgacttttaaaactacagttaaatatatgaagagtgaatactggaatattcaggcaatttttaatgttatagattcatatttttgtttctgtgtttactttaatatgctgctatttaatcctctataaaaattacacatttttgtaacttaaattgctcaagatcaataattattcttttacttaatctctggtaattcaaacatactttcaaggtattgacacttaggaatgttaaccaatgttgttagtttttattctgtgtgttttaagtggaacaactgttgcggattgaggtcaaaattgtagcttattataggattagtatttgttgactttttttctttccgttctatttcagtgattgattattgcagctacagtgactgagttgggcagaataagctgctcaggaaacattagccacacatcttgtgatgacattaatatttagaatttagcagagctgtcagatctttagtactctcattcttaagtgttctggtttggttggtaatgtaaaaaaaaattctacctcaggtgtcctcattcactgtaagatttactattcactgattgctgggagaaatatcaaaacttcacatatgcagatgacaccacccttatggcagaaagtgaagaggaactaaaaagcctcttgatgaaagtgaaagaggagagtgaaaaagttggcttaaagctcaacattcagaaaacgaagatcatggcatctggtcccatcacttcatgggaaatagatggggaaacagtggaaacagtgtcagactttatttttctgggctccaaaatcactgcagatggtgactgcagccatgaaattaaaagacgcttactccttgggagaaaagttatgaccaacctagacagcatattcaaaagcagagacattactttgccaacaaagatccatttagtcaaggctatggcttttccagtggtcatgtatggatgtgagagttggactgtaaagaaagctgagcgccgaagaattgatgcttttgaactgtggtgttggagaagactcttgagagtcccttggagtgcaaggagatccaaccagtccatcctaaaggagatcagtcctaggatttcttttgagggaatgatgctgaagctgaaactccagtactttggccacctcatgtgaagagttgacttattggaagagactctgatgctgggagggatttggggcaggaggagaaggggacgactgaggatgagatggctgaatggcatcacagactcgatggacatgagtttgagtgaactccgggagatggtgatggacagggaggtctggtgtgctgtgattcacagggtcgcaaagagtcggacacgactgagcgactgaactgaactgaactgatatctctagatatatcagaatcactttgctatatatcagaatctaacacaacactgtaaaccgacgacatgccaatgaaataaaataaataaaatattaggagagagtttgtggtgcgggagaccagggatcgattcctgggtctggaagatgctctggagaagggcatggcaacccactccagtaccacggatagaggagcctggctgcagtccatgggatcgcaaagtgtcggacatgactgactctgttcagttcagtcgctcagtcgtgtccaactctttgcgaccccatggactgcaacacaccaggcttccctgtccatcaccaactgctggagtttactcagactcacgtccatcgagttggtgatgccatccaaccatctcatcctctgtcacccccttctcctcctgccttcagtctttccaagcatcagggtctttttaaaatgagtcagctcttcgcatcaggtggccaaagtattggagtttcagcttcagcatcagtccttccaatgaatattcagagttgatctcctttagaatggactggttcgtatctccttgcagtccaagggactctcaagagtcttctctaacaccacgttcaaaagcatcaattctttggcactcagctttctttatagtccaactctcacatccatacatgactactggaaaaaccatagccttgactaaacagacctttgttggcaaagtaatatctctgctttttaatatgctgtttagtttgggtcataactttccttccaaggagtcaagcgaaagtgaagtagctcagtcgtgtccgactctttgcgaccccatggactgtagcctaccagtctcctcagtccatggagttttacaggcagtgatactagagtgggttgccatttccttctccaaggagtaagcgtcttttaattttcttggctgcagtcaccatctgcactgattttggagccccagaaaagaaagtctgtcactgtttccactgtttccccatctgtttgccagtaattgatgggtccggatgccatgatctttgttttttgaatgttgagctttaagccaactttttcactctcctctttcactttcatcaagaggttttagttcttcttcactttctgccataagggtagtgtcatctgcatatctgaggttattgatatttctcccggcaatcttcattacagtttgtgcttcatcaagcccagcgtttctcatgaggtactctgcatataagttaagtaagcaaggcgacaatatacagccttgacatactgcttttcctatttggaaccagtctgttgttccatgtccagttctaactgttgcttcctgacctgcatagagatttctcaagaggcaggtcaggtggtctggtattcccatctctttcagaattttccacagtttattgtgatccatgcagtaaaggctttggcatattcaagaaagcagaaatagatgttttttctggaactctcttgctttttccatgatccagcggatgttggcagtttgatctctggttgcactgtgttttctcaaaccaacttgaacatctcgaagttcatgtttcatgtactgttgaaggctggcttggagaatttttagcattactttactagcgtgtgagatgagcacaattgtgtggtagtgtgagcattctttggcattgcctttctttgggattggcatgaaaactgaccttttccagtcctgtggccactgctgagttttccaaatgtgctggcatattgagtgcagcactttcacaccatcatctttcaggatttgaactagctcaactggaaatccatcacctccactagctttgtttgtagtgatgcttcctaaggcccacttgacttcacattccaggatgtctggctctaggtgagtgatcacatcatcatgattatctgggtcgtgaagatcttttttgtacagttcttctatgtattcttgccacctcttcttaatatcttctgcttctgttaggtccataccatttctgtcatttattgaggctatctttgcatgaaatgctcccttggcatctctcattttctttttctttttggtaaaattcttaatgtaaatttatttattttaattggagtgtaattacttttctttcccattctattgttttcttctatttgtactgatcattgaggaaggctttgttatctctccctgctcttctttggaattctgcattcagatgggtatgtcttcccttttctcctttgctttttgcttctcttcttttcacagctatttgtaaggcctcctcagacagcagctttgtgtttttgcatttctttttcttcgggatgatcttgatccctgtctcctgtacagtgtcctgaacctctgtccgtagttcatcaggcagtccatcagatctaatccctaaatctatttctcacttcctgtgtattatcacagggcatttgatttaggtcatacctgaatggtctagtgttaaattgtaatatggattagtgttaaattgtaatatccttctaattacataattatatgtatattgaaagatttataatattctgcaattagcgtcaccatttagtgtgtcctgttagtatagtttattatgtatttatagtactttaaagagtaaatacttgctttatgtggcaactttacctacattctgacctcctacttcagaaaatataaagtttatttggctttatctctgtggtagagaggaaatccattaagttctattaacacatttacttctaatgcactgaaggtacattgtaaattccatggtgttgtgactacatgttccggatattaacttattctgatttaaaaatactgtctgtcttatgcttttatttgtcttcttttcttagggctttggcaaatattaagaaatgggaaaagctaagtagttttgtttagtttttttagacttacgattcttctaaaacctgtctttttagcttctaggtttggagaaggaaatggcaacccactccagtattcttgcctggagaatcccatggatggaggagcctggtgggtccacggggtcgcaaagagttggacactactgagcaagttttgtttagtttttttagacttacgattcttcctctgaaacctgtctttttagcttctaagttagccagtcttaaattatttgagcagaagaatatcaatactgataacgtcccattgcgttctaaagttttaacaagttatttgctataaaacatgttctaatactcttcaagagtagagttctttgtagtttttattctccaggtatagatcgggcaagagtaggcagaatgcctgctgggcagcgtttacctgtgtgccgagcacgcctgtcttctagtcgttcatctgctgggtgcatctcagtctagggacacctgtggaagagtgcaggtggcaggcttcacgctttcttgctctccctcgagtcttgctgcctgttgagcccagtacggtggccccacagtgatagtcccggagtgtgggatgttcacacagaaggtgtggagaagcatctactgtttcctcacacaagccaaagtgacgggataggtttatgtttgcatcagttttctcattgcagggtggaagcagctatctctaggccctgtgatactcgtgcctgcgtcttagtcatctgatccgcgttccatcgctgtaaggcccctcgtcgcagcgccagttcacagtcccttgtagaaataaaagtgcgctgcggtgcgatgcactggccttcctcagtagcgttctcagtgcccgccatgcctgaattccgccattaaagtctgcactttgttgcatagagttttcgcttttttttaaattagtaatgttaagaaatcaccagtgcatgtataatatttctaagggtttagatgaatgtagaaataattgaagtgaagtcactcagtcgtgtccgactctttgcaaccccatggactgtagcctgccaggctccatccatgagattttccaggtgagaatactagagtgggttgccatttccttctccagaggatcttcccgacccagggatcgaacccaggtctcccacattgcaggctgacactttaccatctgagccaccagggaagcccccaaaataattctcatgacttaatttacctattttaggaagacttcctgcttgcagtaacattttacatgcatggaagaaaatagttggcaagtcaagaagtacagactaaaaaaaagaaaaaatcattgaatcttgagtgagagggagaaacccaatgatagtaaaagaatatgacaatagtgtaaatgaataaaaacaacttttgtatggactggaagagggtcctgagagtcccaagtgacagaccagaaagttacagctcagggcaagagtgtgggaaatagggactgaccgagtggcacgggtgtcacagctacagtgcacagcggacaggagggccagggtgggcgagaatgagatgagtgactaacgtctttgtataaaacattaattcttttaatgcacttccttccctgtacaataagttacgtcctaataaaaattaaagagcaagttgcatttggaagaacaggtcatcgtaactcattgacattaggccacataactgagtaatgtcttccttcagcgaaatacatcaaatgagatcaacaattatgactcataaacatgcctcgcaggcataaaacagcagggaattagcatgtgaggctgataaatatgcatgtgaataagctcccaaaggaataacgtgggtttgattgataggtttagaattggaacatatgtaaacccctttattcctcattctggtgtagctaagtaaagatgcgttttacttgttaaaaagtttcaataactttgtaaatcttaatgccacatctgttttttttgttgttgttgttgttgggttttttggtatgtcacttgtaagattaattgaattgtctacaggctggttggccctcacatccaatgaatggggagcctgtgagagaaaggctgtgcatctgcggctagagaggggaggggtctttgggaaacagctcttggcatcttacaaagtggtgtaggagcataggaagtttcttttggaagcagagatatgacgtagcacttgcctgtgatgcaaaaattgtgctccatatgagtattttggtcacctcatgtgaagagttgactcattggagaagactctgatgctgggagggattgggggcaggaggagaaggggacgactgaggatgagatgtctggatggcatcatggactcgatggacatgagtttgagtgaactccgggagttggtgatggacagggaggcctggcgtgctgcgattcatggggtcgcaaagagttggacacgactgagcgactgaactgaactgaactgatcctgtctttttgtgtttatttggtcttccctggtggctcagacggtaaagaatctgcctgcaatgtgaaagccctgggtttgattcctgggtcgggaagatcccctggaggagggcatggcaacccactccagtgttctagcctggggaattgcatggacagaggagcctggtgggctgcagtccacggggtcacaggaagagcttgtgagagagaggctgtgcatcaggctatgtctctccctagaggagggaggggtctttgagaaattgctctttttgtcttgaaaggtgatgtaggatcataggaggtttgttttggaaataaagatgtgacatagcagttgactttgacacaaaaatatacttcatatcatctcttttctgtttttttttttagcccttaacaatgaaatctctgtttcttcatgtcatcatacagttttgaagtcattaactaaaacacattttttaaataattttttttcagttcttaatacctgtgccttttctgccccttctagatgggcattcataaactatagtggagcggtattagagagtatgcgcctgagtgccagccagatgtcagcaggcccctgggtgtgggctcaggcctcagctgctagatgactttggtgactttaggctcaagtcattccaagtaaatggaaggagaaatgtggctttggacttcctggcccagagccttaggcattattgctgtggggggttcaggttcactagcggaaggcatggtgggatcagacagtgcccatgtctgtaagagaagagttctgctgttttcctctcagaatagatttttcgaattagaagcagcattcttgtaatatcgtgaaagtgctaaagtgtctgtggtttccaaagggatcatgtttttggtttggtgacacaggaaatgagttctgtattgcctgtgtccttcactctgcagagcagggttgttgatgtgaacattaggccttttgatttctgcagctgtgttctaggtgcttagaatacatcagtaaacaaagcaaagattcttgcccacatagagcttacattcttgcaaagggaggtaggaaataacaagcataataaagaattaggatcctgtcttagaaagttaagaatggctttgaaaaaaaagaaatgttgcagttcgaagggactgatagtgtatatatgagccaggaggatacagaattaaatatcagggtagattttggggggaaatttgagctaagacttaaagaaaatgaaggaatgaaccatgtgaacagtgggcattgcaggctgaggaagtagccaagtgcagaagtgctaggttaggagctgccagtcacgttctgcaagtcaggtgggcagagaggtctgtgagttaacgcgagacttctcgtccctggccttcggcggatatagattccacgtggactgaatcgccatctgcggtggtctgactgctggattttttccttgtgaccttttgctctgggggacttcatttattctatattgtttgttcaaaatgtgtatttcccttctgacatcattttttcttgacttattccctgtcttcaccttaacacagatttagttcagcagaagcaaagttaggattttctgtagtgtgtaagagagctagaggagaaagtgaattgagttaggggatacagagttcagagtctgagttttcatataagaaattttaagtctgaggtccacacactgtatgttgcagaaatcaattgggagttgtgctcacttcccttcttcctctcacctgcactcccaagcacagggaaacacataaaggcaggctcgggctttggtggggggagggcttgtcctgggagctgggacgctccactggcatctagtgggtacgtgctgaaggtttgcagtgcaaacagccccacataatgaactgcctggcttcaaatgcccgcaggtgtaccagcgaggagtcctgaggcaaagatactaaggaccaggttagtccgcacaagaaagagagtagtgtacaactagggaaagtagttttctagaagagtaaggactagctgggtcaacaggaaaagcacgaggaatttcctagcctgatgagctgcgcactcggactgcgatggcgctgttgctgttgtggggaagcacagggctctagataaaggcacgtgctcaagtacgcacagtcaaaggcagagccccgcgggtactccgaagactccatgagttgcagtgctcaaataaatggacgcatagttgggtaatgagaagttcacactttggtgatctgatactggttaataaagccatcttcaggaatacgtgtgtttcattctaaatacacgcttggctggagtaggatttctaataattgcagatcgattgttttggttttagagttgctaacttatttttaaagacctcacagcacatgtttctatacaaattctctgggaaatgggaattttaatttccaagacaagtcacagaagtgaatatttgctatacaagtacattttctggcttagtttaggagtaaaactgtctcatgtactaaaatatctgatcactaagaatcaaaattgtacagaaagagcagaaataatattttgaaaaacttaaaaagagaatttaaaaaaagcagcagatctcttgtctgctgtgtttacttgaggatcctcagcactagggctaaataattatttgtaatgaaataaatgaaacacactagacacacacagactcaggttcctggccaggacaaacgtttaacactggggtttgtatacttctcatcctttaatgagagaaaaaacatcatttctaagaaagcatttcatggtattaacttgaaattaatcaaactagctcttatgtcatcatcattgatcttaggtaaagttactgaataagtatattatttaagaaaatgtgttcagttcagtcactcactcgtgtctgactctgcgaccccatgaatcgcagcacatcaggcctccctgtccatcaccaactcccagagtttactgaaactcatgtccatcgagtcagtgacgccatccagccatctcatcctctgccgtccccttctcctcctgccccaatccctctcaacatcagagtcttttccaatgagtcaactcttcacatgaggtggccaaagtgctggagtctcagcttcagcatcagtccttccaatgagcacccaggactgatctcctgtaggatggactggttggacctccttgcagtccaagggactctcaagagtcttctccaacaccacagttcaagagcatcagttctttggtgctcagctttcttcacagtccaactctcacatccatacatgaccactggaaaaaccatagccctgactaaaatgtgtaagtattcataaagctttgctagtcattcatcattctgttgtcttaagtaactaactttttgttgtatctgtatatgtgccattttcatcttgaaagcgaaggatgagctaagaagggctagcagaagctagactctatctgagtagatttaggagtgagcatcctatttgataaaatcagaaaggcactgaaaaattgggtgaagcatcagacccagaataagaacagctgcctgaagctatcactatttttaaccagctatcctccaatataagataaaatgttaaaaaaaaaaaagaatggtgaaacgtacttctagtgtgcattttatctgtagcaaagcagagtgtttgtaatcatctcattaagatttggggagaagagagatcctgatagaattttaaaaaggaagagtggctacatggaaaatgtgtcatacacattattagtaagtacttacttatgaatggtatagtatactttctttttagtagtattcctttatttcagaaaatacagaatattattgaggctttcaaaaatatacctgcaaaattcagccttcctcatcctgttttcattatcattgtttaaattcatctgtaataaagttttcagtcctggtatttttcagtaacttagttatttctgttgaagatggatacttacccttgagaataattaaaaaatgaaattaggggtataattcctaagaaataattataattctggagggaggacttatcacagtcaaatctaggaccctttatttctataggattatcttttccagtggtctcatttgatccaaggagagagagaggggaaaaaagaatccttaaagaaaatgttggctagcctatattttatgtcactatctgccaacccaaagtattctcttagccagtaaactgtctaaaacgccatcactgttttctggagttagtgaaaagaggaggcgctaagcaagtggaaaagagaagtggaaatgcagtgattagaaaaagactcgcctgcacggtgcctgaggtctctcctcacccttcactttactgcttaacaggggccgcggggtgatcagttcgggaacctgttgtactgatattctttatatttggtttattcatctgttttcccaactgaactatttgttctctgaaagcagaggctgtgtgtttcgtcttgaattccccgtggcacacagcagaagctcgctaaattgtgaccgaatgaactgactctgacgtgttagctggcaagcacttacggcgaggccctgggactccatcatgatcggagaagaacagcatgtgtttgcgtgggcacctgctctttcattgatgcggtctgtcgggatggtcataggcagagccaagtacactttcgagaagcagtccatgagagaaagtgctgtgttgataacctcagagttttgtgcccccaaagatgtctaggatctggaaataagacaaacgtaattagtcctctatatcaattgtgaggtatgcacaacatctgaattaaagtagcatcacgtcttaatggacaagaaggaatttgcttaaaaaaataattcttccaggaattgtcctgcctaattgactttgtttggcatttaccagctgtacactagaaagttgccgccgaaagcaaaggcttgaatttgggtgaatttgatattgagttctttctgctctcaatggttacacagtagaactcattgtttcttgaattagttttcactttctggtaatatgcctctcagatccgtttggaggacacagcatatcctcctgtttgccgtggcaggaggctgggtgtcagtgtgtgcgtgtctataaagtgcaagtgtgtgtgttggggggtagattggagtgtggagggaatcagtttcttttcctcaagatgaagaatgatttaaaagtgagcagccaagttttattccccacctgctttctttctctctgttgattcgtagatggaatcttttcagcctccccgcccccaccccccgcctcacagaaaggtacctccaagggttcttagctgcagccaagggagccttttcatgatctcctgtaacacccttaccttctgctggtggggtttctcaggaacactggagtgggttgccacttccttctccagaggatcttcccgaccgagggattgaacccgggtctcctgcactgcaggcggaccttcaccatccgagccaccagggaagccctgacctagagcaaggatggacagagtttttctctggaaatgaccagagaatgagcgtttcaggaatcacaggccatttggtctgcactatgtactcagcttagtccttgtcgtctgaaagcatccacggaaaacatgtgaagaatgggtatggtgcgttccaatgaagctagacttatgatgaccaaacattgactagcatattattttcacgtgtcacaaaatacccttcttttgatttaagtttttttgaaatattggaagcattccgcttgttgttgttcggggctgctgtgtctggctctctgcttccgcaggaactgcagcacgctagttccctgtgtcctccactgccgcccgcagtttgctcaagttcatggccattgagttggtgacagtatctaaccgtcgcatcccctgccaccgtcttctttgccttcagtctttctcagcgtcagggtcttttccactgagttggctgtttgcatcaggtggacagagtatggggtttctgcttcagcatcagtctttccagtgaatattcacagtggatctcctttagcgttgactggtttgatctccttgctgtccaagggactgtaaagagtctcctctagcaccacagtttgaaagcatcagttcatcagcactcatccttttttgatggtccaatactcatatccctacaagactcttggaatctgtcactgcttccactttttcccttctatttgccataagtgatgagactggatgctatgatcttagtctttttgaatgttgagttttaagctagctttttcactctcctctttcatcctcatcaagaggcacttccttgagaaagtgaagattcctgtttgctttctgccattagagtggtatcatctgcatatctgttgttactatttctcccagcaatcttgattcttatttatgaccaatccagcccagcgtttctcatgatgtactctgcatagaagttaaataagcagggtgacaatatacagctttgacacacccctttcccgattttgaaccagtctgttgttccatgtctggttctaacgttgcttcttcagttgcatacacgtttctcaggaggcaagtaatgtggtcttgtattcccatctctttaagaattttccatagtttgttatccacacggtcaaaggctttaacatagtcagtgaagcagaaacagatgtatttctgaaatttccttgctttctctatgatccagcagatgttggcaacttgatctctggtgcctttgccttttctaaaccctgcttgtgcatctggaagttctcagttcacatactgctgaagcctggcttgaaggattttgagcataacctactagcacgtgaatgatagctgaagtgaaatatctgttagaagcagtaaagagtggaatcaataaaggagaaattcaaagcatagttaggacaaattgaagaacagtatagaatgaggggcgatgaaaaccaaagtctcttacagaacatggagtgaggcagataggagagcacttcacagggacctttgagtctttggttgggagttcaggcttgaattagtcatcaggtaaaataacacacatacacacagagagcactgcaagccgctggcttacatcttaccttcacaaacatgattatttacatgaagattattctgatagctgtttctagaactattaatggagaaaatggatgtaccagatcttcagagaagtatgggctgagttataaagccagggaaagagtgtggtggtttttcaaatgaggaatggtgcaagcaggtttcaaatgctagggacagtaaatcagcatgactcagcaccttcccagtacagcgttaacagagtgaaaatgtctattcctgggatttgagagaagcccatggtaaatacatttttaaaaatacagttaacaaagcctgttggaaataaagggagactttcaaccagactgagctgtgtgtatgtgtgtgtgcgtgcacacatgcacaccctcatgcgtgtgtacatacgtgtaaagaaaccatggacagttatctaactgaaaatgaacttaaactgtgcttgcattcttcctttggtattaacatgcctcagagtaatacatgccataaagtgcatatacttctgattatacagccttgtcctgtactgtgcttgaatcaacctactgtggaatgttattttctgtgctttatttgcaagttaacattttaataattatcataaatagttatctgatttgcatattctggttcataatccaactgttctgtggatcaaccacagttctctcattattcatgccaaggcttctatattagtctgaataatctatcctagactgtatttctgtttccagttctcagagctttttataactcaaagttataagactgaatcatacatgtgctagtacagtaatctctttgactgactcttggatggaagtgacttttattattatatgactaccaaggtttctgtgtagtgctgttttcttttatttagatttcatagccgtatgagttagatattcaggtagtattgcagcagtcccttatcttttatctttctagggtgtataagctaaatggaaacgtaggacatatgcactgagaactaaaaaaaactgaaaatgttacttttcaagactcagattatcaatctgtataaaacagatcacatagtagaaatggtcatattagagaggcagagtgactgggtgactggattaggaatttggctgtaatgtaactaatgaacctggaatacctagacaataaattaagttttgacaaggaaggtcagctggaagtgcaaattgataagcataatgatgaccatgtgagcattagctgcagagggagcgattgtttcagacaatcatcatgttctctgtagttatctctagagatgtggaaggacgcatgtatcaagttagaaaactttgaagccgttaaaattagagtctgatctccgtttataaaactgtggtatttccttatcagctaatgttctgaaaccttgacttctgaggaactcttacgaatagagacagtagtggttagaatctcatacatatctgattctcctcacagatttctttttttggctccacatagaacacattcattaattggcttatatacacttaatttcttatatgcacagaattggcttgaagtatctgtctccagtaaaacctgatgtactgaaaatgtagcccctagggtttaagacagtgcttaccaccagagtggtaaaggtacaaatatgaatacaccacattccatcatggttgccctcaattccatgtagtatagtcccatcatataatctgatataatcagtgtaccctactaggtgtttttatcctgtcatggtctgctataaatttgtagggttacttttgcaaggaaaactctatttttcgaaggcattgagccttcagttcatctgtgtcttacccataaatagcaatcctgagtcacgttcccatgccttaacattctccttaagcaaaggtaatgtgactttcagtgcagacttaagaggtaaagctgttatcttcttcatatgcatattctctatagcaccgcacaatgtcttttaaattgtttggattaaactgcagtgtttatttggtgctagctacacataaatataatcatgaacttctgtgtgcttagtcgctcagttgatccaactctttgtgaccccatggacaagcctgccatgttcccctgtccttggggattctccaggcaggaatactggagtcagttgccaagccctcctccatggggtctttccaagccagagatcaaacccaggtttcccatgctgcaggtgaattctttaccatctgagccaccagggaggtctgagaagactggagttaatagcctatgccttctcggggaatttcctgacccaggaattgaactggggtctcctgcattgaagggggattctttaccagctgagctaccagggaagcccagtcatgaccttaaggatagaaatttggtcagcttggcttggtgagacatttgatatggcagacattagttagctgcttcactcagttcagttcagttcagtcgctcagtcgtgtccgactctttgcgaccccatgaattgcagcacgccaggcctccctgtccatcaccatctcccggagttaacccaaactgatgtgcatcaagtcgatgatactatccagccatctcatcctctgttgtccccttctcctcctgcccccaatccctcccagcatcagagtcttttccaatgagtcaactcttcgcatgaggtggccaaagtactggagtttcagctttagcattactccttcaaagaacacccaagactgatctccttcagcatggactggttggacctccttgcagtccaagggactctcaagagtcttctccaacaccatagttcaaaagcatcaattcttcagcgctcagctatcttcacagtccagctctcacatccatacatgaccacaggaaaaaccatacccttgactagacggacctttgttggcaaagtactgtctctgcttttgaatatgctatctaggttggtcataactttccttccaaggactaagtgtcttttaatttcatggctgcagtcacttatctgcagtgattttggagcccaaaaaaataaagtctgacactgtttccactgtttccccatctatttcccatgaggtggtgggaccggatgccgtgatctttgttttctgaatgttgagatttaagccaactttttcgctctcctctttcactttcatcaagaggctttttagttcctcttcactgtctgccataagggtgatgtcatctacatatctgaagttaatgatatttctcccagcaatcttgattccagcttatgcttcggattcctgccaagcatttctcatgatgtactctgcataaagttaaataagtagggtgacaatatatagccttgatgtactccttttcctatttggaaccagtctgttgttccatgtccagttctaactgttgcttcctgacctgcatacaggtttctcaagaggcaggtcaggtggtctggtattcccatctctttcagaattttccacagtttactgtgatcctcacagtcaaaggctttggcatagtcaataaagcagaaatagatgtttttctggaactctcttgctttttcaaatgatccagtggatgttggcaacttgatctctggttcctctgccttttctaaaaccaacttgaacatctggaagttcactgtactggttcctgtactgctgaagcctggcttggagaattttgagtatgactttactagcatgtgagatgagtgcaattgtgcgttagtttgagcattctttggcattgcctttctttgggattggcatgaaaactgaccttttccagtcctgtggccactgctgagttttccaaatttgctggcgtattgagtgtggcactttcacagcatcatcttccaggatttgagatagctcaactggaattccatcacctccactagctttgttcgtagtgatggtttctaaggcccacttgacttcactttccaagatgtcaggctgtagatgagtgagtgatcacaccattgttattttctgggtcatgaagatcttttttgtacagttcttctgtgtattcttaccacctcttcttaatctcttctgcttctgttaggtccataccatttctgtcctttattgagcccgtctttgcatgaagtattcccttggtatctctaattttcttgaagagatctctagtctttcccattctgttgttttcctctatttccttgtattgatcgctgaagaaggctttcttatctctccttgctattctttgtaactctgcattcagatgcttatatctttccttttctccgttgctttttgcttctcttcttttcacagctatttgtaaggcctccccagacagccattttacttttttgcatgtcttttccatggcgatggtcttgatccctgtctcctgtacgatgtcataaacctcattctatagttcatcaggcactctatctatcagatctaggcccttaaatctatttctcacttatactgtataatcataaggaatttgatttaggtcatacctgaacagtctagtggttttccctactttcttcaatttaagtctgaatttggcaataaggagttcatgatctgagccacagtcagctcctggtcttgtttttgttgactgtatagagcttctccatctttgtctgcaaagaatataatcaatctgatttcggtgttgaccatctggagatgtccatgtgtagagtcttctcttgtgttgttggaagagggtgtttgctatgaccagtgtgttctcttggcaaaactctgttagcctttggcctgcttcattctgcattccaaggccaaatttgcctgtaaccccaggtgtttcttgacttcctacttctgcattctagtcccctataatgaaaaggacatcttttggggttgttaattctaaaagaacttcagccaaatgaaggcatcagctctgacccattgcctgcaatgtagtaagcctcatgtgggtatttgatgaatatgtgaacttaaatggaaagttatcatggtaagctttgaaaatcataacatagaattaaatagtaatagtttgcatgctttctgttttctgaccaggattgtagaaagctggaaaaaatcacttctaaacttagaacagtaaaaagctggactgatggcagggtcactgcttttcttgaacccactgagtactgaagttggaagggaatgaactggtacagaatctagagggagacaaatacctttctcttgcagatggaagcaagatacaagtgtcaacttggcaagatgcagcggacacctgtagaaagagttaagctaaaatgattgttgagttgtggaggtcaaggttgtgtgatgttgagaaaaattgaagctgggggggtgggtggggtgcacaaaaatagaactctgcactctcttgtgtagatttttcttcaagaatcccatcaggcagtcaaagaatatttccccttgtggtgaagaactgcagtaggaaattcagcagcctaatgagacgcactgaagctccaatagtttggccacctgatgagaaaaactaactcatttgaaaagaccctgatgctgggaaagattgaaggcgggaggagaaggggacgacagaggatgagatggctggatgtcatcaccgactcaatggacatgggtttgggtgaactctgggagttggtgatggacagggaagcctggtgtgctgcagtccatggggttccaaagagtcggacatgactgagcgcctgaactgaaccgaactgaataagaggcacagtaaactctagctggactcttctccctcttttctcttatggagtaaaaccatattctgttggggtacctgcaataattactgtttccttgaggagcagttggaatccctttgcagcctgggatttagagttggggaaaaaataaacctcagcctgagaggaagcttaggagcaagtattggaaccaaaactataccaggtgaggggagggtccctgagagtgcacagggaactcatctggctgcacagtggttagggctgcgctgccactgcagcggcctgggtttggtccctggtcagggaagttccacattctgtgcagtgcaggcaagaagcaaaacaaaacagaagtacacactgccctgagagctagagacactgtgctcacttgagactaaagacttaatcagaagatcagagaatactctgccccattgttcactccctgcttccaggataacacctgtcaagtaataagtaacttggaagagacagacgtttttggatcatgaggaattaaggctgagaatggagcaagtgtgagaatgaaaaaaaaatctttagcaacctaaattcgccatctctaacacaatgtgctctgtataagagttttcagcctttgctctcaagtataaccacagcaactacaaagtttatacctagctcagctcctaattaggttagcacaaacccctgtgcaaaacttatagtagaaggaagtgtgtgctcatttctaagcataaaaactactttaatctctactactgataagcttgataaccggtgaacataagaacttcaacaaaaaaataaaaagagtttgaagagggatatgggaccccctagccccccaaaatataccattcaaggcacaaagggctaaacagacacaactattacataggcttggcatagtctcataaggaaatttaaataactgaattatatgttaaaggacttactggaaaagcctgtcagcaggcaaattcagatagttaatttcagcagagatgaaaattttatcaaggaatgcaatttaaagttcaagacatataaaaaaaggcaacagagatagagaatgtgtataacaagtgtctaaatctggtagattgcctgaagaactgcggatggaggttcgtgacattgtaaaggagacagggattaagaccatccccatgggaaaaaaaagcaaaatggctgtctgaggaggccttacaaatagctgtgaaaagaagagaagagaaaagcaagggagaaaagggaagatataagcatctgaatgcagagttccaaataatagcaagaagagataagaaagccttcgttgttgatcaatgcaagaaagtagaggaaaagaacagaatgggaaagactagggatctatttaagaaagttagagacaccaagggaacatttcatgcaaagatgggctcgataaaggacagaaatggtctggacctaacagaagcagaagatattaagaagaggtggcaggaatacacagaagaactgtacaaaaaagatgttcacaacccagataatcacgatggtgtgatcactcatctagagccagatatcctggaatgtgaagttaagtgggccttagaaagcatcactatgaacaaagctagtggaggtgatggaattccagttgagctatttcaaatcctggaagatgatgctgtgaaagtgctgcactcaatatgccagcaaatttggaaaactcagcagtggccacaggactggaaaagatcagttttcactccagtccccagagaaaggcaatgccaaagaatgctcaaactactgcacagttggactcatctcacacgctagtaaagtaatgctcaaaattctccaagccaggcttcagcagtatgtgaactgtgaacttccagatgttcaaactggttttagaaaaggcagaggaaccagagatcaaactgccaacatctgctggatcatggaaaaagcaagagagtttcagaaaaacatctatttctgcattattgactatgccaaagcctttgactgtgtggatcacaataaactgtggaaaattctgaaagagatgggaataccagaccacctaacctgcctcttgaggaacctgtatggaggacaggaagcaacagttagaactggacatggaaggacagactggttccaaataggaaaaggagtacgtcaaggctatatattgtcaccctgcttatttgacttctatgcagagtacgtcatgagaaatgctgggctggaagaagcacaagctggaatcaagattgccgggagaaatatcaatcacctcagatatgaaaatgacaccacccttatggcagaaagtgaagaggaactaaaaagcctcttgatgaaagtgaaagaggagagtgaaaaagttggcttaaatctcaacattcagaaaacgaagattatggcatccagtcccatcacttcatgggaaatagatggggaaacagtggaaacagtgacagactttattttttgtgcctccaagatcactgcagatggtgattgcagccatgaaattaaaagacacttagtccttggaaggaaagttatgaccaacctcgaaagcatattcaaaagcagagacgttactttggcaacagaggtccatctagtcaaggctatggtttttcctgtggtcatgtatggatgtgaaagttggagtatgaattaagctgtgcactgaagaattgatgcttttgaactgtggtgttgcagaagactcttgagagtgccttggactgcaaggagatcaaccagtccatcctaaaggaaagcagtcctgcgtgttcattggaaggactgatgttgaagctgaaactccaatactttggccacctcatgcgaagagttgactcattggaaaagactctgatgctgggagggattgagggcaggaggagaaggggacgacagaaaatgagatgcctggatgccatcaccaattcgatggagatgagtttgagtgaactctgggagttggtggtggacagggaggtctggcatgctgtgattcatggggtcgcaaagagttggacacgactgagcgattgaactgaagtgagtaacaagggtcataaacagagttgacaaagaaaaaataagaatcaatgaactataaaatatgtcagtcagagttattcaaattgaaacatgaagagaaacacaagtaaaacactcatgaagcaagagacgaagtcatgtgggacatgtgggtgggagcagttcagaagaaatgtttaaggaagtaatggtcgattatttctccaaattaatgacaggcactaaactacagatccaaaaatctgggagcacaaaccattgtaaatatgagaaaacaaataaaaatttccaaacatagttgtatgatattcaaactgatagaaacagaagacttataattaatggcaaccagaaaacaattagtgtagccataatagaaagctaatacgaaattcttacagatgaaagaagtaaataagaattagagcaaatttcttatcaaactcatgcaagctaaagaccgtggagtgacgccttttacgtgctaaaaggacaagcacaacttctcaaactagatttctataccaaatgaaagatgttctgaaataaatgaagaagatagaaagactcttccagatgagcaaaatccattggcatttattagcagctcaactgtataggagatgcgaaaggagagtggccagaagggacagacagggcaaaggcactgggatccgtgccaagaggagaaagagcgttgggagcggagtaagcacgcgcgagattattttttctccttttcactgccctaaaatctgaatgtctaaactagaaacagtagcagtgtgttctgtgtttacagagtacgtaagattgataggcctgatggcatagcacaaagggtaagagggaggaatcaggagttactgcagtaaggtcgtggcatcacacatggcatcgtggtgctgtttgaaacagctctgattgattacatatgtagtacaggcctagagtagggatcaggagacaactttcttaaaggacagtgtcatatatatatattttttaattcataaagcattatgatctttctttcaaccttatagtgtgaaagcaaccttagtgcagaaacaaaccggcatggttctgtttcagtgcaatttaacctgcagagacatttgactgtgccaggccacggtttgtcaactcttgctctggaacattgattaaaaaatgtaatacagaagaataaataataattcagtagagggtatcaaatggaatcataacatatcctcaacttaaagtataaaatgagagaaaaagaaaggatagatggaataagaacagatacaaaacagtagttgggtggtatatcttattttatccatatcagtaatcacattaatatgtatactgtaaacacaccagttaaaaggcaggcgttgtcagaaaaggttttaaaaagcaagaagtaattatatgctatccacaagatactcaactttaaatcaaaaagatgtggcaggctgaataatgcctccacccaaatattttcattctctgtctgctagaacctgtgaatatggtgacttacatggcaggaagaactttgcaaatagtcacatgttgaggaactgaattctctgtgaacacccgaatgagcaaggaaatattttttcccaggaacttccagtaaggtacacagcccagctcacacctcaattttagcccagtgaggacctatattagaattctgacctacagatctgtaagataatgcatttgtgttgttttaatccactaaacttctgctaatttattatagaaataatatagaaaactaatacaaatgaaataggaatatctaaagtaaaagactgcaaggagatccaagcagtccctcttaaaggaaatcagtcctgaatactcattggaaggactgatgctgaagctgaagctcaagtactttggccacatgatgcgaacaagtgactcattggaaaagaccctgatgctgggaaagatcaagacaggatgagaaggggacaaaagaggattagttggttggatggcatcaccgactcagtggactgagtttgggtgggctcggggagtcggtgatgaacagggaagcctggtgtgctgctgtccttggggttgcagtgagttggacacgacgaaatgcctgaactgaactgaaagtaaaagaatgcagaaagttataccttgaaaacacagagctacagtagctattaatgtcagactaagcagatatcagaatgaggattattattagtaataaaaagggtcattatatgtgattttgtccggcttatgtcactgaatgttttcgggttccaaccatgttagtgttgttcagttgctcagttgtgtctgactctgtgtgacctcatggactgcagtatgccaggcctccctgtctttcactatatcccggagctttctcaaactcatgtccattgagtcggtgatgccatccaaccatctcatcctctgtcatccccttctcctgtcttcaatctttcctagcatcaaggtcctttccaatgagtcagttctttgcatcaggtggccaaaatattggagtttcagcttcagcatcagtccttccaatgagtattcagggttgacctcctttaggattgactggtttcatttccttgcagtgcaagggactgtcagagtctgttcccacaccacagttcagaagcatcagttctttggcactcattgttctttatgattcaactctcacatctgtacatgaccactggaaaaaccgtagctttgactagagggaattttgtcagcaaagtgatgtctctgctttttaatatgctgtttagatttgtcattgctttgtttttgaagagcaagtgtattttaatttcatcgctgtagttaccatctgcagtgattttggagcccaagaaaatatagtctgtcactgtttgcatttttttccccatctttacacgaagtgatgggactgaatactattatctcagtttttaaatgttgagctttaagccaacttttccactctcctctttcactttcatcaagaggctttttagttcctctttactttctgccataagggtggtgtcagctgcatatctgaggttattgatatttctcctggcagtcttgattccagcttgtgcttcctccagcccagtgcagtgacattggacagccttaatacactcctttgccaattttgaatcattccgttgtttatgtctggttctaactgactgcagccatgaaattaaaagacgcttactccttggtagaaaagttatgaccaacctagatagcatattgaaaagcagagacattattttgccaacaaaggtccgtctagtcaaggctatggtttttccagtggtcatgtatggacgtgagagttggactgttaagaaagctgagtgccaaagaattgatgcttttgaactatggtgttggagaagactcctgagagtcccttggactgcaaagagatccaaccagtccattctaaaggaggtcagtcctgggtgttctttggaaggaatgatgctaaagctgaaactccagtactttggccacctcatgtgaagagttgactcattgaaaaagactctgatgctgggagggattgggggcaggaggagaaggggacgacagaggatgagatggctggatggcatcaccgactcaatggacgtgagtttgagtgaactccgggagttggtggtggacagcgaggcctggtgtgctgcgattcatggggttgcaaagagtcggacatgactgagcgactgaactgaactgaactgaactgttgcttcttgacctgtgtacaggtttatgaagaggcaggtaagctggtctgatagtctcctctctttaataatttcccacagcttattgtgatccacacaatcaaaggctttagtgtaatcaatgaagcagaagtagaaagtagcttataaaaataatcttattaataaccaaagtaagataattacatatagaaataaaatgttaggaacacatttatttattattcaccacagaaataatttcaaataatttcaaaggatttcagttttcagatcttcatttggactaccttagaattaagtatccaggtgtctctcttttatcagattatcctgtgatctgttggctcgcttccttcccctccccattattcagtctttacatagcagttaaagtgatgatttccaaaggtggggtggagagtccttttgatcctttgaaacgtgatggcgttttctctttgggcctctaaagtcgcgctgcctcccctcctccctgcgttctctggctcctcctcttttggtcggggactgttcctgtctcaagtgccattgtacagaagattgtataactttattctttgacatttttgaagttgtcagggtacattgctttgactgtccctctctcctcaactgccaaaaacccccagatgtcaggagtgggttttgagcttcttgctttccaccatatcactagtgctaaaatgcaataggagcttaacaggtgatcacagcaagaacttttccattaggaaagctactctgtaatccaggtgcacaactagaagtttgaattactacataaacacatgtattgactaggcccattagccatttgtctagataactatttggttggataaaatgatcagtaaataactgctttgaataatgtatttaatactctacaagcatagttgaatttggtaagttatacgtttcttagaaaatttaaaggagttgccattttaaaaatattcctggttattatgtaaggttaagaaattatctcccctaataaatagactttatcataaaataataaacaaatcagtttgaatatttagaattcttctttaaagtgagattttagtacaattatttaatattaaaataaaataacttatgaaatagaacagtttgatggatcatttggccttcccacgtggcaccggtggttgataaaagaccctcctgccagtgcgggagatgtcagagacgagagttcaacctccaggtcgggaggatcccctgggggagggcccagcaaccctctccagtatcctgcctggtgaaccccacgccgggaggagcccggcgggccacaagccatgctgtcccagagtaggacacaacggaagagactcagcccacatgcgtgtgccagttaaaatggttttgaattttttaccttgaaggaaatggtagacacttgaaaatttttgataatgtgtttgaagattgagatgactagatttaatgtgatttcgtttagtaaattgttttagaagctaaagataggtgtgagcatgtttgccctgggttctctgtctgagcttcgggactttgtagctgaggtgcccgttaggctttctacggggacgtttggtataagaacgtgttcagttctctgtcatttaaaagatatattaatgatttaccctagttcgtggatggtaatttatatccttcaaagagttccagtttggttttttatacaaaaagggagatatttaacattaagtatcttatgttaagtacatgaggttaatggtgtctttacattttatgaggtcatgtcctcttgatgtcagttttaaaggttctagcactgattgtaatcagtagtgaaaatgagaattgctgaaagaaatttgttttgtataaaaggatatttcattttttatacattgaagagaagaatatttaatatacatattttatagttagtatttgaaagatttaagtgaaatagaacttcaatagcaaatgtactgtagcaaaggatatgtaaatgacttttgctgtattatttacgcactagacaggtaatttgatttcagctttagaattccttcagtgtcaattagatcatctttgaaaatctactgtctttattttttaaaaataaaataagtattttattaaaacttgtgttaggactagtagcaaatctaaaaatgttggtcagaatttaaactaagtcattatttgtatttttgttaaggaaaaatgtagcaaagggcaaagtgtaaagtaatcatctttggccttgatagtttttgcacattataaacttggaagaatattttcaagcattctttgtcaacacatttacttttaaggaagctcttttttaaatctatgttgttggttatctgcttactataaatgtattttgtaattttctaaattatagcattggcactaattatgtaactcttctgtaggaagatgcttttgaagcccaggtggtccacaggaggaccacgtaggcctatagcagtgttctgctgggcatttccactgtgcaccctccccagtaatcacttcatggaactaagaacacagtttaatgtgcagaattggcatacctcaaagcagtcctctgctactgctagaaaacgtggtcagatttgtgccttattgatagctgttagtaaatgaagatgtgtgagacgcagtccctatttgagatacattaaattgccttctgtaagagattattaccttagcagtgtagacgtttatttttcagtaggaaggacttttgtatcatcatagtaatctaggaaagctttgaaaataaagggtgttggatcccactcagagttctctcaggctcgcccactttcccagtcttctctcctgcagacacaccatagatgcacacggacgcataccctaaaaacctgtcccggggatggggattatcagcctgtcatgagcttggtctgacctggccctttccttctgtactgtagatgtgaatgataggacccaaagaggttaactctgcatcggaattctcttcacttgattgattcctggtctactttgttttttttctgaaacattaagcagctctaagtccatagatgggaaaacattggcaacagtgtcagactttattttttgggctccaaaatcactgcagatggtgattgcagccattaaattaaaagatgcttactccttggaaggaaagttatgaccaacctagatagcatattcaaaagcagagacattactttgccaacaaaggtccgtccagtcaaggctatggtttttccagtggtcatgtatggatgtgagagttggattgtaaagaaagctgagtgctgatgcttttgaactgtggtgctggagaatactcttgagaatcccttggactgcaaggagatccaacgagtccattctaaaggagatcagccctcagtgttctttggaaggaatgatgctaaagctgaaactccagtactttggacacctcatgtgaagagctgactctttgaaaaagactctgatgctgggagggattgggggcaggaagagaaggggacgacagaggatgagatggctggatggcttcaccacctcaacggatgtgagtttgagtgaactccgggagttggtgatggacagggaggcctggtgtgctgcgattcatggggtcgcaaagagtcagacatgactgagcaactgagctgaactgaagtccttagaatgcctgaagagacaacaatatgcctggaaatgacaatgataagaaataaagatactagcatttgagtgttattacatgttaatttagaaagaaaaacaccaatatagtatactaacacatatatatggaatttagaaagatggcaatgatgaccctgtatgcaggacggcaaaaaagacacagatgtgtatagcagacttttggactcagagggagagggagagggtgagatgatttgggagaatggcattgaaacatgtataatatcatgtaagaatcgaattgccagtctatgtccgatgcaggatacggcacgcttggggctggtacacggggatgacccagagagatgttgtggggaggggggttcgtgtttgggaacgcatgtacacccgtggtggattcataaaaaaaaaaaataaataaataaataaattctgtagttatccttttgattctctttagacttaggctttgtttcagttctgtctcagtgtataatgaattcttcttcaagcttattttattctgatacatgtgtagtattgtatgaggttccttgatggctcagtggtaaagaacttgcttgccgatgtaggagcctcaggtttgatccctgcatcaggaagagcccctggagaaggaaacggcaacccactccagtgttcttgcctaggaaatcccacggacagaggagcctgatgggctgtatagtccatggggtcacaaagagttagacacaatttagcaactaaaggacagcagcagtaatactgtccactacactgtactgtgtgtggtagctccggtttatccctagattcaccagagttttagttatctatctgcattttatcagcaccaagaaatatttttatgtgttcagctcatgcattgagctctcattttacttaattttactgtttctccactctcagtgtttggtgttatcatcaggaaggatattaaaagaatagtacaaatgttgcatagttgtataattcatagaataaacttttgttaattataaattttatcagaaatgatggtttttaattactaagaagaagaataatttccagttatttaaattatgaataagtttattctctttatatagaacgaatagacttctactttgactccttcgctggatacagtatcttaagcatattcactgataaaagcgttcataaaaagatcatgctcacggaggttctaggttgtgctgcatgctgtactcagctctttgcttgcgctcctctaatcgtcatcaccacattttgtggtgtaaactgttatcatcttcattttgtagatgaggaaactgaaatactgaagttaagttagagggaaaataaatggagtatgtcctcaggtctttcctgccagagctttagcttttagtcgtggtgtttcaatacctctccttcaaaatttcttcaaattgaatgtgacagtttgattttaccaattcattattttcccccccagaagttgctttaaagtttaatcagaaatcaccatcaccttttttgtaaaaacaatttttacaaccgctgtgttcatacagatcctacctgcatatttatttctttgtctttctagctttagacactcacatttgcatttattatacttaagaattttccagtgtttttagtaattgacttctacccttattcttttgtagttagacaaggtattttgtgtagattcatgccggggtccagccccggtggatccagggtgattcgaaggtggggacggcatcggcgtccttggaaaaatacatatttaattacagatatagagagacattagaaacggatagtgtagtaggaaaattagtggacaaaagaagctgaataacttggtttacgtggaatagcatccatgctccagatgggaattcagccagaaaaacggggagcaagaaagaaatgacatggggaaatcagtctttctgcaaactgatccaatttctttattttggggtttgcttatataccttttgttacacatagggatgaatacagagtcacgcgggggtcagcagtcctgaccttcatcaaaatcaggtgcttcacacaaaaaggtcttaggggttttacatcatcttctggccatgagacctgctgacattttatgatcctttctttctgataaccaaaaaacttattttttccaagggtgttttttcttaaaccaggcaccaccctccaaataaagttacattcctatagggtgagggtgtagtgagttacaatcaagaaaggaatttatttaacccaaggttaacatgattaatcttaaaggttaatacttatttctcctatatgcttaaaggttaatacttatttctcctatatgctagttatattcattataagggcagggaacatggagatttagcagcaaacatcaacccaacaaatgaaaatcctttcaccaatgttccccttaagatctatttagtcttaagatttgctatgaccagtgcattttcttggcaaaactctattagtctttgccctgcttcattccgcattccaaggccaaatttgccaaacactccaggtgtttcttgacttcctacttttgcattccagtcccctataatgaaaaggacatctttttcaggtgttagttataaaacatcttgttggtcttcataaaaccgttcaacttcagtttctttagcattactggttggggcatagacttggataactgtgatattgaatggtttgccttaagatagtgataaagttacatttttacacagcaaggacacaatgatttataacaaagtacactgatctattacaaaagagaaaatgcattaactcaaaaagtctagtattgctaaccttaaaaaatactatatttccttttctatattccaaatacattgattaatatattcccaggtgcctaaggatatggagccctggtggcaatccttgactcaacaatgagagaagtcctatgctaatcggttcagttcagttcagtcgctcagtcgtgtccgactctttgcgaccccatgaatcgcagcacgccaggcctccctgtccatcaccagctcccggagttcactcagactcaacgtccatcgagtctgtgatgccatccagccatctcatcctctgtcgtccccttctcctcctgcccccaatccctcccagcatcagagacttgtccagtgagtcaactcttcgcatgaggtggccaaagtactggagcttcagctttagcatcattccttccaaagaaatcccagggttgatctccttcagaatggactggttggatctccttgcaatccaagggactctcaggagtcttctccaacaccacagttcaaaagcatcaattcttcggcactcagccttcttcacagtccaactctcacatccatacatgaccacaggaaaaactatagccttgactagatggaccttagtcggcaaagtaatgtctctgcttttgaatatgctatctaggttggtcataacttttcttccaaggagtaagcgtcttttaatttcatggctgcagtcaccatctgcagtgattttggagcccccccaaaataaagtctgacactgtttccactgtttccccatctatttcccatgaagtgatgggaccagatgccatgatcttcgtttcctgaatgttgagctttgagccaacttttccactctcctctttcactttcatcaagaggctttttagctcctcttcactttctgccataagggtggtgtcatctgcatatctgaggtgattgatatttctcctggcaatcttgattccagcttgtgtttcttccagtccagcgttcctcatgatgtattctgtatataagttaaataagcagggtgacaatatacaggcttgacgcactccttttcctatttggaaccagtctgttgttccatgtccagttctaactgttgcttcctgacctgcatacagatttctcaagaggcaggttaggtggtctggtattcccatctctttcagaattttccacagttgattgtgatccacacagtcaaaggctttggcatagtcaataaagcagtaatagatgtttttctggaactctcttgctttttccatgatccagcagatgttggcaatttgatctctggttcctctgcgttttctaaaaccagcttgaacatcagggagttcacggttcacgtattgctgaagtctggcttggagaattttgagcattactttactagcatgtgagatgagtgcaattgtgtcgtagtttgagcattctttggcattgcctttctttgggattggaatgaaaactgaccttttccagtcctgtgtccactgctgagttttccaaacttgctggcatattgagtgcagcactttcacagaatcatccctcaggacttgaaacagcatatgctaatcaagactttcagtatactccaaaactccctgtgctgttcatggttgagaggtaataaacaatcactttgtgtgtgtagtggcaggaggatggataatcctgtcacacaagctaatctgtcagcagagaggtttgacctgagacatccttgtcccacccagggcagggaattagcagcagttattggcacaacaaatgaaagaaccctttaccaatataattcgtaaccaacccactaaactgacaatttcccaaaagaatttgcctttagtaagtctaaaacatctcgtgcctctcagatttggaggctgtaaacaatcacatgtggccggacgaatgtatacaggcgggctagataaccttcagaggagtccgtaagctgaaacactcttgtcacgcccaggaatttttattgccttggagctgcatgtttactcctcctccgagagaaacggttatgggggagagcccccccgtaaagtcagaggggtaggtgagagcataaaacagagtctggttttggggtagatgctccagaacagggagtttcctgaggcttgatcacgcctttgcatgtgccaagcctccttcctcatgacctttgccatgggcggagttcctcattctggctccgggcagattcagtcttcctaactgtactgaagcttgttttgtgacttaagttacggtgcttcgtggacagtgctcgagcgcactcgaggggaccgtgtcttctgtggctggctggagggtttatgtgcgtgtgaggtctacctggtttacagtcttgctcaagtcctgcagttccttatgtttcctggatctcctgcctagatgctatgtcactgttactgtaggactgtctctccctgagctctgtcagtgttcgcttccgtatgtccatgttctgtggtttggtgcagacgtgctgtaactgttgtatctttcatggtttgatcctttcatcaatatataatgtcctttgtcaaacagttttcttgtctgttggagcagtctcttttgtctaatattagtatagcgaagtatctctctctgtctcactcttctttttgggttatttttacatgaaatatcttttctatccttttactttggttcttaaatgagtctcttgtagacaacatatagttacattgtggtttttctgaatgcatatttttctaatctctgcttttgaatgaaactttaatccgtttacatttaaggtaactgctggtaaaaagagtgttgccattttcctgttatttttctgtacgttttatgtcttctttccgctcatttgctccactactgctttttcttgtgtttggttgtttcttttcgttttgttttgtagtgaccattgtttgttccctttctcttcctgttgtgtaattttttatatacattctttgttactgtcatagggatcacacttaaatcctgaatttttaaaaatcaacttcaaattgataactctatagcatacaagatatgtgctgctatactgccctgaccttttccctttttatgttgtgtgctaagttatttttatacattgttgctcagttgtatcaatttataatcatttttatccatttatttttttatatcctgtaggaaacacagtatgaaatctttaatcttaaagacaatgatactggctttatatttgctcacatgtttacctttaccagagatctttatcttttgttacagcttggagttagtttggtattctttcctttcaacttggaagtttgccattagcttttcttttagtgtatgtctactctcagcttttgtgtttctagaaatgtcttacagtcttctcattcattttcaaatgagtattttggtagatacaaaattcctgatctacagccgttttttcaagagcagtttaaagtctgtatagatcccgccactcttctggctgcatgatttctggtgagagattaactgctgatcttactgaggattctgtttcttccttcaagagtctctgcttgttttgtcttagaatagtttgctgatattgtgtcttgatctgagtctctgagttaatcctccctgaaatttaatggaatttcttggatttgtagatctctgctttcatcagatttggaaagcttttcaccgtatttcctcaaatactctttctgcctctttctctcctccctgtgagcttcccgtagtgcatttgatgatgtgcttgatggtgttatacaaatctcttgggttatggtcgtctttcttcactctgtttttaaatttttgctcctcaaactccctaatttcaattgtcctatgttcaaatttgttatttctgtcttctgcctgctcacacctgtggttgagcccctctagtgaatttttcaactgaattgttgtgtttttcagcttcataaattctatttttttataatttctacctctgtgttgatatcattttgttgatttgctacatagttttttcccttttttttagtcttttttttttttttcctctttgaacatctttaagacagttgtttcaaaatctttgtctagtaaatccagtaatttctcagggatagtttccattagtttattttcattacttagatgagccatatttcttgttccttagtatgcttcatgattttgttgttgttgacaatgtgatatttgtacattgttattcaaaaatcaggttctccagaaatcagattctttctcctgggtttgctgttttccatgttcttgaagattaccttagtccatttagttagttactctcctggaacatttttactttcacaaagtcttattctttgacattgaagtcttaggttgtgtttggtgaggattttgacggaaattttttgaatgccaggagctaaaagaacagaaccccaaacctctccttgcctttgcagactgtttctgctgcagcagtccctcatttagccaggcccacagtcctcccagcggctaacttcatgtggacgcgtgcagtcttctcaggctctgcatcatcatgcatcttgccctgggcatatgcatagccttctgtactcccctacatgcgcaggtgcttctgaatgtcctaatttctgaaagaaactcttgctgattttttccccaggtcttgggagggctgttttatggtttggttgtaatcttttgccccaggcatctgctgacttttaatttgacttgcagtgtgttcaagagcaagcaaagcctgccttttttcttttttattagttagatgaaaaaggagataaacatcttcagtcagttcttcaggtagttcctaacaaggtagcattgatttacacggtattttgcagatatggtcttctctgctcgctctgggaccaggtgcagtttgcacacactgggaactagctttcatgtccacaactgctactgatctaggataaggatagaacaaaaccccacagagctttcaagttgcctttttcttgactccttgttcatttggttctgactgatctttgactatttccaaagtcagtgcagagtttgttctgacagtttttgttttctgatgtttctgttgaaagatgagaatttagagttgtatattctgccactctgcattctcctttcttttaaaaaagaaaattctgtttaatatttaacataaataacaaaaatattatcttcttaaattaaaattgtccacttcgtgttatttatttcaaatagttgctatgcatttgttttacatctgagtttcattatctaatttaataatctgaaaatattatgtagagaactaaatatgcctattaaatcattagaatgtagacagattaacagtagagaaaacgaataattattaaataaatttcctacatttatttgagcactagctcttaaacctaaatgtgtggtcctagattttcagcataaataattgacttagcatattgtttaacttattcttgaaattatgtaatatttttgtggctactgttttcatagacaatactgatattatataatgtatgtcaacacgtgaatatacttaatttatagatttttttgtatcgttcaccttgaatgggattttaaatttacgtaaaacatttcagtagttatcctcattcatttaaaaaactcacacagttttgggtgtttacactattcatttatgccgtattatccatcataactaaaaatgtggctacccacagctttgttttcaacttagtttaaccaaatattttcccattactattaataattcatcacacacacttgatgatatttatctgacagttcagaagtcagccttttttaaattgttgtacttatcagaattcatacctagtgtgatatgataccctaaaattagatttttttatgtataagctgaaggcatagttgagtagatatgcttgtttatagcagtattctgcttgcttttaatctaaccaactttaaaatcttggtcctcccttacaaagcagatgtttatgtattaaaagcgctattgaaatctattgtaaaccttcatttagcatgatttcaacactgcacagatactgtaaatgctcttggctcaacatgactgcagtaaaagctaaaaaggagtccaaatttaatttattctacttttgaaatttaaatcatcattatacatattatggttttaataagttagatacaaaggtagaatgttaagaattacaaacagaaaatactatatgctctttgtatcctcattaaaaacaatatagctatgagcatttttttttcaaatcaggcaactttgtttaattatgaatgttgtgaactcattttacaaagttacttaccaattaatgagaaataaatgtgttatgtaaatttcaaactgtaatggtcacaggtaattgatgaactgttcctataaatatatacattgtacaatcttatgcatatatatagcaacacacaaaatttgtacattatttattgtatataatttgtatatttatttaaaatttactcaataaatatatcgagtttagtttttggttagtttacattaaatattgaaaacaccttaaaatcacaattgtagttttaaagtttactctgttgttaaaattacttttcaagcaagtgaaaggaactctttattttaaaacacatttgttctgttagatcatttaaaggtctttgtgtgagagtactttaatgcattttcgtgcacgtgggggtgtgtgtgtctgtgagagagagcgggagggtgggagggagagaaggggagatctgaaagcaacccatgtatccttgttacagttacagctccctgacagcttagttcaagaatcagaacagcaagggaaaacagcatattagactctcttgcaccctctgttgttatttttgaggaacactacatttacctcccatggttataatggcattagatttattcaagtccctgataaaattaatacttaatttactgtacttccctccaaactatgttgacagtaaagtagcatttgtttttaattcttaggttgtttttttcttgtgatacaatatgtttttattgtataacagcttaaatgaaaactgaacttttctgtttgtcttttgatttctcctagttacaaccagttttaagctctaccaagtgtttcacacaaatgaaaatctgactggatatagcacactgtatatgtaattttccagaattataaatcctgcctgttcttttgtaaacctttcgattgtcagacagtttctttccaaaataaaaatctacagttgtccatactaagattaagaatttataactgtaaggaacagatgttttcataaacatttgctataattaatttcaactagagaattgaaggaacaaagcagttttccccacttcaaaactttattaccttttccccatgcagcaaactctgaagtcttttctctaatactgtttagagaaacgattgtactccttatttggtatgtttttgagaaagaaaaactgctttttttccttattactatcctttgaaggttacatttaatgtgatatattcatttccaaacaggtataaaatgaaggaaacctttgtgatgtattttgatgacaaaactttggtgtttactgaaaatctcttaattatttgaagtattttatatttattgtgataatataagcagagggcaagaatataccattggtgagatcttatgtatttaaataatcatagtctttatttttgaagaagaaagctcacattctaaatgtatgatatggtacttattctatactatactgcttgtggaacgtttcacaggaaatgtctgcaagctgttaataacatgtgttgtaggaaattttcacttaacaagacagagggagactaatttgccttaaatctttttagtttatttatgataatgctattaatttttttgaaaagcaaatgaagcatgatgtgagtcatcttatggtacccatgttttcaaagaattaacaaaatatactcaactagattgatctaacatttaagtgttttggattgttttcttctataaaatttggcaacattttgaatgctgtaatttttaaagtttttgtttaatgaaaaagaaaagcctgagagtgtattttgaaaaaaatgaagacttaaaatttcagtaactgagctcagaccactttcattcttttaaataatttaggtgcaacagcaaagattttgaagagaaccaacatttttgacttatctgtcaactataaaacatgcaaagaaaaataggcagctatcattaaaattgcattttagctttcagaaatcattaatgagcagcataatcatagtagtagggtaccttcagtgctatattcgattatttgaaataatctcatttctaaatggaaagctgtgtaattactgtttgacctaaccaggactactccgatgacgttcagtgatactttagaatgttcaagtggattaaaagtataaataaaagttggattaatcattaaattatgaagctttaaatatcttaaaagtgaatataacctgatgtttgaaatttacattataaaaattaggagtgtaaaatgtaatcaggttctgatcaatttaatttgtttctaagaataagtgatatgtttaacagtagtatctgtgctttcataaaaactatacttttaagtatatatttaaaattttaatctaaaattaaatttctttcaataatatatattttatattgtagcagtttttaaaacttacttagcaaatttattctatgatctttaaaaggataggtataaatttgttctaatctgattctatgaatatgcttgtatggacaagtttttctccctaaaagtttaatgttttacatgaggcagaaatacctttagatgttgattttttaaacaggtgagcttttgcccacagttaaaacataacatttggggaagactgctaaggtgtaataaaagctctttagaatgcattctcaatcaccacccttgaactctgcaaaccagattcctggagagtggaggaggggggccaaagtggagggggccaagtcggctgtatgcttgttctcttcaggtcttccactggacaggacacgttaataaaaagttgccttttgtttataagcattagtgtatgaacaaatggtgtacaagttttggttttgtgattcataagaagaagatgtctgtattattcttcatttgttcctatttgtggttactttggtaatattcctatccaagttacgagtggtggtcttagtctagattttagtgtcaaaatgaatttttggtttaaagggctctgattaaaaaagctatttgggggagagataagggagtatatgttttctgactcagtatactgtgtggagctgtcacacagcagcttttcaactgaaatgttcagttttataatctccattatttcagtgtttttcttttctttttttttccaggagattcaaatcaaaatggaagaacaagttctttagactctgatgggacttttaattcctataggtacgtgatgaatacatagatataagataagataatgtacaagatacgtaatgcagaggcttctgctcttagaatagtaaggactgtaacctatgctttagcagtgtgacaaacgtagagtgctgtggtatgcgattgtcctgcagacccatcacgtgggtggagctgtcgtaaacatctgctgttacctggagtaggatgatgagagtgtatgcccgtgtatacatgtattccacttcattataatccattttgctttgttttccagtatatctgttacagtactaagggcttcctttgtgtaagtttcctgctaatacagagtgtataaaatgtaacccgcggttgcattacgtgctattgttaatgtcctgtttggctcctttaacaaaagtgaagtcgctcagtcgtgtccgactcttcgtgaccccgtggactgtagcctataaggctcctccatccatggaattttccaggcaagagtgctggagtgggttgccatttccttctctaggggatcttcccgacccaggaatcaaacctgggtctcctgcattgcaggcagacgctttaccgtctgagccaccagggaggctctcacaaaaataccttatagatattggagttacccagtcccttctttgagtgctgaagtgtaatagaaagcttggaattgacatattaaataataggcagaatcttctatccaaatatgttaatcacacctaaaaagtagacgaatataaaagatatttacttattggctgcattgtgtggcctgtgggacctcagttccccaagcaggggttgaacctgggccccagcggtttgaaagggcagaatcctaaccactagaccatcagagaactctctataaaagatatttaaataaatgctcatttggcatgtaactgaggaatgctaagatgataatacatgtgaaatctatagtagaagtatcattttagatataaatactgttttaaaaaaaaacaagacaaaaggaaaataaagatgtatttcaaaggatgggaaggaagtccatatgtatgcatcgattttattgttgaatttcacagctacttttgtagtttagctaattatagtaactaatggacataaagttaagagaaatgtgttaatatgaaggcacagtgttatcttgtagtttattttgttcttgagtagtttgaagattaaagtatcttagtattattgaatgataattgtactttgaaaatgaactcctaatgcaactttgcacaataaatactaatgttgttaactaatatagttttaatcaatgcctgtcagtgttgtaatgttaggatattaatttattgttgtaattaaaaaggcaagataaaaagctcaggtagtacagtatataaaatgagcttttaatagttggcaggccagtgctattattaaatagtattatagtattcaaggtgtgaaatgaatatttttctactgagtaggcaatagctcttacaatataatgagcttacttgtgaatttgacacttgggttaaatggcagacttcatacaagcacagctctagagtctattttcatatcagattaactgataaaacctaggaattgttgcagaatcacactacagtggcaacagaattgtcagtaaagttcaaaaatgaaaattatttttccattactatcagagctctttaaagcaagcagaaataggttattagaaaaatgtgaatatttcaaccctcaaatatcgtttagcacaacacatctacctttgtatttagaccatctcagaaatactgatctttcttcacagataattctgtcaacctagtaccaagatactcaagctatatatgcttgtgtctgagataacagctttaatttgttatctgtagaatggacattatagtgtctgatctgcttctttctcacaactgttttcaaggttgaaatagaattgcataagataaagcctttggaagctctgaatgcacagccatggattactgtcatccacgtattacgcttagctcaggcgaatgggcaatttactgccctagagttcacttaccctccacgtgtgcacccctttatggcatatgatgaggttgtactagcttttgaattcagtcttggtcacctaagtccatgttctctctgttctttgtttatattattgtagtcttagattctcagttgtaagagggcatggcctctttttttgtgtggtggttttgttttctgtttgttcatattatcgtgacatagtaagtcggttcatatcctgactccacatggaaactttggacaagtgttggactcagtttcctctccttgaatgtgggagtgataaaacacatttgttacaaggcgttaatgggttattcttatatgccaaacactggatcagtgttaactgcttttatcttccaatccacgtcatccccaccattgtcatcactgttaatcttctggaactgtagaagatttttacagtgtgctaatatagagacaccaaaaggaagatttaaaaacagtgtgtcctacaggaaaatagctgaagtttttagcagaaaggaggctactgtgcgctgcgtgccaagtcgctttagtcgtgtccaactccgcggccccgcggactgcggcccgccaggctcctctgtccatgggatttcccaggccagggtcgtggagtgggttgccacgctctcccacagggggccctcacaacccagtgcctcttcctgctgggtgttgggagctgggccctttaccactagtgccacctgggaagcccagagaggggctaggagcaggctaagcccaaggcacgtagtctgtctcggatgcgtggtccaggttggctttgtgtaacaagcttgtacacatggtggggataaaaggaagatgctttattatgaatatttaagtgcaggggtaggtttttggaattttgacagatgtgaaatttgcagtcagtgggccctgacaacagccctatgcgcctaatgctcacaggtttgtttccagaggcttggaggtttcactctgggtttgtgtctccagtggttttgcctcattgattcagatagcacacggctgcatttaactcctaaggctccagtagggtgattttatgatgcctgggtaatagactaaatcttggttttggaagtttctgttaaaatttatttgtatcccagctagtctgtagatgatgtggtaaaatggaaagattagaagaattgagacgatattactggtttatgcagtgtatcctgtgctttttaaagaccagcgttaatgtcttctgttattaaataagctttatgtttcttacttcaccattaaaactgagagacccttgctcggtgtgaaagcagagaagtggtttgctttcaccttagtggcttcagcctgggccacatggcgagtgccttctcccgcaccccctgcctcttcccaagggcagctgaccttctcctctccaaagaggcgagccccttgccagcgcatatgactacagactattacattaatctgtttagctgtagtaccagctgcttgcatggttttaattatcttattagatggtataacagtgacctatgaaataaattgaaggtgaacatttttaagttttcccttttttaccctatgtttctaaatatctttattgataaaattttgatattctgtaaaagttcattgaaagtatatatggttttgagtcaatcaacttaatgctctttaaagtatagtagtataattaccagtataaaagtaacttcatttttgcctcattttttataagatttaggttgtgtttatgtggccacaaattcatgtgaaaatttgttgctttaagagtcagtttagagaaaactcagaccagttgttggcattctctgggaaactcaaaatattgcttagatttcagacaacatcttggcattgtataaatggcataagatggaatacaaattattgtagattattttaaaataaatttgtctatttaactctgattttttttaaattctttgtattcagtggtagatcatctagctgaccctaattatttttacaatttaatttcacatgctactatttctgagtgtattttcccaagctgcagcattagaaaaattgtatcatcttctggattttgacagttggatactttgcaaattatacttaaatagaatgtcgactccaagagacacagttcaaaataataatgaccagtgattattatcaataaaaattataataatttagtcagaagctctgatgtttaattaaaaagcaggtagttggatgcaaaaagggactgcataatactatgtatgtcatttgaattaacagatcctacagctggcatgatgcagtgacttgagccttgaaaaatgtatactctttgaatagttacaaactacacattatttgtttttttaattaagaaatattcagactttttggcttccatagtttttttccctctaacgaaagattaagtttcatatttcaaaaggacttttgttaaataagggaaatttttcctctttatatattttattttctttttaaggaaggaaaatgaaaagctacttggtgctgaagtactggtgtattatttcttgatattgaccagagcttccaaggttgcctccctttctcaatatggtattttctgtaggtcctagagtccaaagttaaaagtttaagttggttaatagttttttttttttaattggtttaagttggttaaaagtttttttaaaaaatatagttgagtcatcgttttgaatttaaaagttgtctttttctgaataagtaaagaaaacattaatttgaactttctttagtcattgaggaaattttaaaaattagacttcaggttttattgcaaagatatttatgtgtcctatttacatgtgattaataatttgaaaggatgtgggaagtatccttaatgtcatttacatttatttttgatattgtacctctcccccatttgtatgtaagagggtcatatgtctcttgaaatgaaagtgaagcagtgactcaaaacgttagaaataatagggcaaaagcgtgttttgaatttaaaattagaagtctgcattatggttatagtcttggaatgatataaatttgttaatccattatttttaggaatatggaattacagaaacatattgtaatatgtttttacagaaacataattgtgaaagttacactgtattagtttgggctcttacgacaaaataccagagactgggtagcttataaacaatagaaatttatttctcacagtttggaggctggaaagttcaagattaagatgctggtagatgtggtgtttgatggagcccacttcgggttcatagatgaaatcttttcactgtgttctctcatggctgtaggggcaagaaagttctctgagagcttcttttgtgaagggcactaatcccatcactcagccctgaggacagtcgcctcccaaagacctcacccccgaacaccatcagattggcgtcagaattcagagtgtgaatttgcggggccacatgccctcctccatacgttacactgaggaggaggccgaatggaactccccgcccccttcttcactcactcatctgaagttcctaaggcctcgccattttattcattttccaggacgttaagtgaagtggctcactcgtgtcggactctttgcgaccccgtgggctgtaggagcctggtaggcttctcggtccgtgggattttccgggcaatagtactggagtggatcgccatttccttctccagggatcttcccaacccagggatcaaacccaggtctcccacattgtagacagacgctttaccatctgagccaccagaggacgtaggtaaataaatagataagagaagagggtctggactgagggtttctttcctgattcttaggacactgctttcctcactttgacgttatgcttgtctgttgagaatccatataattgtatgactctgactctttaagttcttaaaaataaatgcacagttgagggaaacaagttggaaaagcacacaggtagaaataagacagactgaagtttgcctctcagctccagcacctcctgactgtgtggtcttaagcaaggctgtcaagctccctgcttcctggttgcttcatctgtgaagctgagtgtcggcacctcctctgtcatagagctgtgtgtggctggacccatcacctgacacatagtgagtgaccatgccagtttctttcttctgtctctcttttccaaaattcctttaagttttaatcaagtttttcacctaacaaggttggccttcatttcagaaaagtttttaaaattctatataaaagtgaaggtcgcttagtcatgtctgattctttgtgaccccatggactgtacagtccatggaattctccaggccagagtactggagtggggagccttttccttctccaggggatcttcccaacccagggatcaaacccaggtctcctgctttgcaggcggattctttcccatctgaaccacaaaggaagcccttatagttctatcgtggcaataaatgagtatttaagaataatatctacagttatctgtacaaggtcagatctatagatatcgttatctacagattatagaggaagaatatttagaaaaccaatacttctgtttagcctaacattatcaaatgttcttaattatttttttcatatgtgctcaagtagcactgtaacacagttaaatgataatttcagagagtacaaaattaatcattttattttttggaaaccaaaatcagaatattacctttaattcttatctccataatggagccacatttgagagaagaagaaaaaaaatcacgttttaatgatgagtgtatcctcttcaagcccctttattattttttatgtccatggaactggtcagtagcgccatttctctctaacatattatctgtctgaactaatcattgatcacgtgaggctctgaaaataggtaacctttcacttaaattactaactggtttatttgcatttatagcctcagattagcataactcaaactgacttgatcatacatgttaacagtttgagttcctttccttcagaagccccttcaagccctttttattgtctgtagccaggctttggggaatttttttttttttccatgtttgtttatttacaaagttagctgcaggctccaatcatccaaggctgtgtaaatgtttatctttgaaaaaacaggcgtacatttgaaatatgggagtgagctgctcagagtcagcctcactgtgagtcctgtcccctggaagcacttaagtttcctcctgggctcctggtgaaaacgccccgtcagccccactgccaccatctgtaatgtatattagcacactgcgttttttggagacggggagattcaattaaatatttgatcgataatgttgaactgtgttattgaactcttaacttgagaaaataatgcatagaattaggatttaaaagtgatgttatacatatttttaaacattctacaaatagcttgcttatatccttattgatacattatatgattagttcattatactgcttaatttctgatgtttgatttgatggacagtttctaagtctcaaagatatattttaaggatgaaatttatatagaatatttcaataaaaattagtatttaacatttctctcttttctgtatcagattacctcgccttttgagggaaattggcagtgattaataatcctattttttagttttactccagagttttcacaagtgctttcctgacgtgtgtgtgtgtggtttgttgttgttcagtgtgagagctaaatatcttcagtcattctgcagttcgttattctccacccattacaggccagccagtgagctagacccagagagggacccagagcctgccgtggggcactcaccatctaggcggggaggcaggcttgccagcagctagcatagatgaagactgctgcaacaaggcaggcgtttcaccaagaactaggggcaggccaggcggctagttgccagtgagggtcggtggtggtcaggaggaaggtgtgtttgctaggtatagtagaggaataggagttttccatgaggtgaacagtatgaacaaaagcagtctttattttctgttctagcactgcattcgtcaggggtttgggccactcagaatgggtaggtccgattagccttatatttgtcagtgacagtcttttgcatgtgcatttacatagaactgtttcgttgcagtgacatttttactttgcaggaactgctattttgacagtactgaagttttagatttcagtgtatcccagatgtttgatatatctaaatcaatgatcagaagttttaactgggaagtgaaaatgtgactcctgcacaaagttatatgaaacagtttatagtgatataattgagaatgaatattatgtgcctagaaataaaggaaaagtcaataaacctgccagagaaggcaatggcaccccactccagtggtcttgcctggaaaatcccatggacggaggagcctggtaggctgcggtccatggggtcgctaagagtcgtacacaactgagcgactgcactttcacttttcactttcatggattggagaaggaaatggcaacccgctctagtgttcttgcctggagaatcccggggacgggggagcctggtgggctgccgtctatggggtcgcacggagttggacacagctgaagcgactcagcagcgtaaacctgctgtggaacagaaggtgccatttgaatgtagaagatgccctagttccatcccaacacacaggcctcgtgctcattccgaggtcgtagaggccctgctctgagataggtgacatattctcaaggagtttcagagactgtgtttccacttccttgtttaatgttagaaaagtaattcggatgccatgcccaaggctctgaacccatagaaacatgacacggtagttagctctcactccagttcccaacctgcttctaggtcttgaggttcccttgagtggcaggggcccactgtcatggagccagacccagtgctctggtggtttggagtctgttccagtacaggataaatggatagtgtccaaagtagctccttcacttttcacgctctcctgccctcacctcaacgcagggccaccccaaagcctgtgtctctcctttgtattctgtttgtaagttgagcaggggccagttttctttttacctgagagatctgggagagggtggatggagcaggataagtaaagccagaggggtctgtgtggtgttttgagctctgttccgaatctgtgtttcgccctgagctgccggtggagccttctccctagggaagcaacccatttacctgcctctgtatcgctgctgctgctaagtctcttcagtcatgtccgactcttcgcgaccccagggactgcagcccaccaggctcctccgtccatgggattttccaggcaagagcactggagttggggtgccatcgccttctccatctgtatcgctaggttccattcttaattgtaatatttttaaaagttctgtagaaaacaaatgaaaattttcttctggtgctgattttcagtcttacagtagcacttcacaacaactttatgaaaacatcccatttgttcattatgtggtcatatgattaatttttttgtggcattcatttggaaatgcctgagtttgcgagtgtacaaattaacagaatagcatctagcagagtaacaaaaggtcttttgtgaagtcaagactagatttgggttcttttgaagtatatgaactttcaaataacataaaatttcagcagtggcagatacatctgcacatcaacacaggactttttctgaagcataatttaatttgggcaagaaggtcatgagaaaaccactcatctcccactgatggggagcagctgtttgcaaaaatcggtggtagaagctctgctcctactggtgctgcgtgggaagcaacatgcagcccggaacccggtctcacagcctgactccttcacttcagtgtcttcccgatgtccattgttaaaaacagcgatcatcccacttctttggacatgcagctacgtgtaatttatttagaggccagatttctaatagcttcacccaaggaggatgtaatcagaaacttaggaacggggaggaaaaatgagtttgttcatttaggtagagtcagtcacaggaagtgcttccttaatttccttccatttacctaatttcccatttttttaattaaaaaaggctagtacaatttatgctgttgaagtaggctagagtgtatgacagttcaaagtctagtttgttgtctttcttttaaaaaagacaaactgagcaagtgacagaggggtgcaaatttaggatttctaaaagctaacatatcagtttacaaatcagtagctgatcccctgacaatcgtggctgtgagagaaatgccactaaaaatggaatggaaaattccaaaagccaagcagtgtcgagttagttaatgtagaagcaaatggccatccattatccaaatgtgtataacatctggacagaatttctgtaagtttttgaaatgttttgatactctcaacatttttgagttgagaaaagaaaaatcacttacatggcataccttggcctttcatcatgcagggtaaattagatatgcaatcataagttttgtttcttttttttaatctataagtaagtgatgttttctagtttttttcacccttgagtggggttatttccttttccaggggtccatgcaaaattgttttcctaggtatgttagtataacaaattagaaagcacacagtgacattaaactaaagtttatttgatcacatggcccattgattttcatttttaatggtcatttcctggatcttggagccagtctcttgctgagtatggttaggttatgctcacagttcaaatcttgggtctaattctttccagtatcactaacttttagtaacttgtagatggaccatagatgtcattgtaagtcttgcttcgtgttgggcatctgtgagtgaagggggaggaagcaggagcagagggtggggcagggtggaagcgcaggcagtgagaggcagcgggctgagagacacggagaaaagcaaatgtctacctgtgtaactgacttgacttgcagtggcttttcctctgtgttgcctctcttacagagtcatctttgatttttttgaagccacttgtctcgtctaacttttaaggtattcctgtctttccccagcagtgctatctgagtgggtgtcatatgcacacttatctttacatcccttgagcctttgtagttgttactttacaaaatgaaacgtgtgtgtggttatcgtcctaaagcagtttgtgtttcactgtccgatacaggaaccactagttgcgtggggctgcttgaatttagatttaaattaactaaaataaggtctatcattgttcagctgcagtagctatatttcacatgcttagtagagtattatgtctgaccgtccaaaactgttgctaactccgttcttcattatctaccatgtgcatactgagttagaggctcaaacttccttgagtcacagttaaatctgaaaaccgaatcaaagcatgatcgtaagttgattttaacgaactgcctcaccccgaactgcctgctgcctttgtttcaatggtgccacatcacatgagaacattttccacctagaaataggaagaaatccattttaggcttgtaattgtgagttgtttttatgagtatttatatatatgtataagtaatatgtttcattatgaaggagaaaaaaagctttaaataaaagtaagtttttaaaaattcctgatataggaagcaaaaaagccagtacaatttctaattgccttttagagtctctgagttccctcattacctgtgatttaagctaaaaatgcggtaattacagatcacatcagtgtttatctggttgatcccgacacctgcagtcctgacgcagcttacccagatctggggccacacttaagagtctgatgctgacattcctaatttacgcttctcccatttcctttgatttttaagttagatgttccttgttctatcccaatagtattttaaaaactatacctttaaaatgttataaagacacatacgtttttatgtggatattggaatcatggtacagtcctttaattaagaggaatctccccttaacacatttctctgcagattaaaaatttgactgtgtccttcttccctttgcatttgataaagcaaatacggtcataattaatatggcagtctttccacatattgacatgcactttaggatagtaaaattatttaaaccatttcacatgaggtgcagttttcttccctgtggttccgcacctttagacagtcttcccatctaactctgatcttgtccagtttaaagatcacctttccttggcctggcctttagtcctgctgttgctctggtcagaccacagagacgagatggccttggctgaccagccaccgctgagagctcctgtgccacccccccttatcctaactgccccgtctcttcagcgatgtctcagccttccctgtggggcagcccttctctgttccactcaacaacttcattatctgcaagagcaaagtagtgcctcttaaccaagtgactggaggctctcaggactagactgtgggtagcctgtgaccgctgctcagttattgtaggtgccggggtttcttgtgttagctccatagagatattgttccttgtctaacgaaaaccaaaaaatggggtaaaaccattacgtaaaatatacaatagagggttttttctgtgtatcctcatttgggagagcaattcagaaattttttaatttcaaaattggcatgtcatttatgcacgcttcaggttacaaaaatatttaaacagttaaatgtagaaggtgctaaccagtttcacactctttttatgtgcatatcttgggaagtatgttaagaggttctattttcttgggctcccaaatcactgcggacgttgactgcagcaatgaaattaaaagatgcttgctccttggaaggaaagctatgacaaacctaggcagcatattaaaaaggagagacattactttgctgacacaggtccgtctagtcaaagctatgatttctccagcagtcacgtatggatgtgagagttggaccataaagaaggctgagcactgcagaattgatgctttcaaactgtggtgctggagaagactcctgagagtgagcccctgaacatgttttcagggacccggtgcctgcactgcagaggcttggccactaggtggcaccagggcatgtttatgagaggtttcaagggcctggtctctataatctgttccatttgaggcaattaggcacctaaatgtcccctgtgttcttaaccactcacagcatctgctgactcaccttctcagtccagctggtgaaaacgtatctctgtacttttggacctcatgttcaaaacctaaagctgtaaggaaagaaatataaggcgcattcctgtcctgccctcttggggccttttcgtcccttggtgtgtggagagccacgcttccctttgcggctgccagccccgtcattcaggatggtctggcccgcgttctcattctttctctctcgtgacagtttagttactttttctgagactcagttttgtcattcataaagaggggttgaaaatactcaggagggtcgttggaaaggttaaaagtgatttacccaaaatataacaacagatcataacacgaatggattgtttttcagcattttgagagcatcattgctagaatttttgctacgacagactatatagttttatgtaagacaaagttaacaactatctcttctttactcttgttaattaaatgggaaaagtccaccgccgactcctcggtacttgatattcttttcccaggttccagattgttggccacggtttgtatctgtgattggaaagaactttccttttggtccagctcccctcaacgggttcagctttcccacattttgtcctctatacactgttcaacctctggcagctaagtttttgggtggcatttcagtgcctgtggggatactacttatcgtgttttacactgagttttaattttttgatgtaaaattatttctccctcctctgaactgccacagtgctttgccttaatcacacgattattggtttacgcatccgtttgctcccttaactgaatgcttttaaaaaatgcctctaagtgctaagtacacagtaggcactgaataaatgttcattatgtctactgtgtatcacagtttattaacaaaacaccgtcccagagaagagaaagacagtagattattttgtggcctttatgtgcctgtgttgtcagagctctccatcagtttgagatttgtgttttaattagaactataagtacctctgaataaatgtaaataattgtgaatttcagagagaatgtttccattttccatgcctcagtctccttttttctttaccaacactgtaatcaaggcacagggtctcatttgagctaacaaataattatccttcattacgtaagtgctgtgtaacttgaccttaaaaggctgcggaacttgacgagccagcggtggatctagccagctgcgtctgcctccacggtgcgctgggccctgtgcataggagctgctttgggagagtctgggggagccattgcctcacacgctgctccctctctgatctgaaaagcactgttgctttcaggccatggagctgcatggtctcggagaaattatgccatttgaaatctgtgttttctcttcgtagactataagctatttaaacagaagcacattttctgagatgtgcgcctatattgttctttgttcatttttttttctcatttttgactaaaactaaaagcaaaatttgaacaatgagatgtgggtgatatatgtgaagctaatgggaaatggatagtatatttaaaatttcatagataatacaaatgaactaaagtaattttcaaaaaaccgaattgatttccttgaacttgaagtggctaagaattaacttaagcatgaaaacaacgtaaagagaatcaagaggaaataaatgttaggtttaaattatatatgaaaagtttcagtggtttgaaaatcaaaataattaggttaaaaatacacatacatggcagacagcagtgtctttaatgtatgaaacacttctctcttggaccagtaagtccaagtaaaagcagtgttgttaacaacagtattaaatttttagatgttatgatatgctgggtgcccttttaaggatttttcatgtattttaattctcatagtaattattggaggcagctgctattattattactccatttcatagatgaggcagcagagacacaggttaagtgaatttcagcatgcttgcacgcctagtaaagtatgtagtttctgaatggatggctttctttgtatcgcagaagcgtggctctgatgcctgtcctcttggccagtagcctgtactgcttaaaatgggcaaagggcaagaaaggacattttaaaaaagaataaataaaatggcccaaaatcatgaaaaattttctgtttcactaatgatacagaaggaagtaaaactctaaatgaaatttattttcttctttgactagggtgatggaaataagacgtttccatggaacggtggtaggaattcatttctcccagtgcagggctgtggggaagggctgaggttctctgctcggggcgtgagggactgccgttgcctcggccactctcctggaaggctgggtgtggaagatgcagcttgctccgcagtcaggggccagagcactgggcgtgccgctggttgggatgcacagtctgaggtcacctcaacacgagtggggcctggccaggggcagccacgtgcgtgacacagaggacgattgagaggttccacggcttccttttgagttcatctttctgaagagagtgccaagcttgcagctttgatgataaattttacattatcagtttattgtggcactgtggaatctcagggaaatttcatacagccgcactaagtcacctcaactgttgacaaatgattcttgatgtttagtttggtacaagatgcagagaatgtaggtctgcttcctttattcaaactcagtaactggtttgggacaattaatttctgcttgtttcccagtagagcagctttacttgtatattaatggggcacaggtgttgggcccctggtgtctgtgtgcctgggaggcatatttcagttgtttatctcctcagccataggtacggcaaggtactcaagcttgcctttcacagtttttacagtgaggctttttaatttttttgattttttttcacatttgcctgcacctgttaaaattttaaaactgttcatgtagaaagaagttgcaaagatttcaatagtaaatagtactaaaaattgaaggaaataatcttctattctgtttaactgcccggccttacgtgagagagaagtgagttgatttcatgagatctttcaggtgagaagccaatatgatcaatcaatgacccaaattttggttgtgtatttttgaaacaggtatatctttcttagtgtctaaagcagtcatatacttgtattaatattcattttttttcttgttgattcactgaactgcactaccaacatttaaaaggcagtggaatagcctccacagacattatgaatttcagtagctggcataattatagcgatctacatattcattaaatctacaggagaactctgtccaaaaagacagccatgcgttcagaaacagacaactaaatatatatattttaaaagttgcatctctgaggcttatttaaaattaaattcctgtagcactcctctccaagcagaaggattttaacaaaaggatccccacgctttggtttcttgcatctaggaaagaatgggaagaactatttgtaaacagcaattacttggcaacaataaggcagaaggggattaatgggcagctgagaagcagcaggttccgcagcatttgctggaaggtaagaagaaaatatttatgtacagtttgtggttgcagtctatcaacacattacctgatgccctgggagagcacccgtgcgggagatcgctgagttttccaagagacttcactcgcgaggtttggctatctaggtttatctttcataggacatttgctaataaggttgaagcaagcgccttagtcctggatagctggcgatggtgcaggagtcatttgaaataccggtcttttcatcccatttgatggtgcggaactcaagcaaagccttctgggtctccagaggcatttgcggaaatccttggcgctgggctggggtggtgggtggctgttttcaggctcctgttatatcgagtgctaccatgcagtcgcccaccttcatttctgcccgaatagcagacaggaaagacactttcatattttctgtactggaacacagtgaagggcagcgagaaggagaagtggagagaaattaggtcagtttctttcagaggaaggccattggtcatcccctgggtaatgacaatctgcagtgtccctcatggcttagaaatcggtccctttttgttctttcaaaatgaatcagtttagattgagactcactttttaaatgacttctcttgaaagttgtttagggtttatctgcataaattgagcagacggagccggcaagtgacaacagtaaggaacacttaatgtattagacagtttgaaatctaataattcaggtttaataattaaagtgcgttttccttctgctcagtgaaggcagggtcgtgctgctcggctatgtgtacaggaggctttgcgccccccccccccaactccatgttgtttaactttttgagtctccttcctttgctaaaaataaactcaaacccagttttattttaatgttttattaaactaaattaaatttgtctttttgagaatgcttgttaattttgtaaactgattgctagttgtaaattgcattttctgctgtaaaaggaatgacttcactgctcaggcttgtcctcgaattgttcctctctgtccattacctgcttgtttgaagactgatcttggaaaccttgatgctacaaagcggaccttgtgcttgttaacacactctgtcaatcaccccgtaatgcaagaaaggggaacagggcggaccctaaccctcatgagttctccttgttcacctttactgtagctctggagagatgatgccatctcggggtgtgtcttttagggtcttgcttcctggcctttgtgcacttctgcagttgtccaagttggtgtatgtcttgcacaccccacatacagttgtgagctggaatggtgatgagtgtgaagcaccgcgaatgcgtcttcttcagttttcaagtcatgccctttggtgtagtttcatgttttctttggatttttatgaaagttttcctgttttttttttttttttgacagctttttctttgtgttcttccgcaagataaaagtcagtggatgagtaaaattaaagaactaagagcatggtatagcagcattaaagaaatagtaagttgtgctctaagtaatgtaactgtgttcttaattaggctttgaaggccagcagcctctgacctttgtgtgtgtgttttctttctttccagcacatcacaaaccctaggaaggctgttggccagcaagacttgatgatcaataaccccctttcccaggacgaaggggtaaagttggtgtttattcacgtctcggccgcgcttgcccatcagagcacgcttgtgtctcgttctcagtcaccgtggaagcagtgttactgtacaccagtagggcgattcttttaccaccgtgttagtccacctagagccgggtgggcgttattccctgctgtgtgctggcagtgttgggggaagccaatgggctgcttctggagacaggcacggtggaggggaggccccggggctgtgagagctcaggggcagagagacgagaaccgagaggagggctcggctggggccgaaaggccgccgtgcacagagcctcccttctctcagaagtgagaaagcagcaccgggaggacagctctgcggaaggagatagctgtgtgtagtgactctctgaacagggtttaagatcatgaaaaagatgaggccctctgccctcagatcccagtgaggacgaggagcgatacacctcagaggcactgtgtcgcttctccagttcctctttctgtgctgaaggacgttgttttgtttcacattttctgtatgaaattaacatttcttttttcctcatatgtgtaattattatagtcagtgaatattaagcaatttttaaaacttgaagttcatattttaagaaatagataaaaaatctatgtgcttatgaaaccaaagctttgtagaaaacattacgtatctttctgtgttggcaattcaggtcaggttccagtgggaccagctggcctgtggtcctcctctagttcaggtagaccagttttttgttgtaagggtagcagcagatgtctagcagtaaaagtatcattcactttaagaagatagtagaaaattttaaatatgcacagtaatatcactggaaaaactaatgatagaatgattatgtgtctctgagattagactagattttaataaagcattttccagttccaggttttctatctgcaatgtgaaatcataactcagagaaggataaattttaattatttgaatcattagattgagatcataaaagtcaagcaaaggtgcagtattgttttaaataaattgctttccttatttcagagtctttggaacaaattcttccaggataaagaacttcggtcaatgattgaacaggatgtcaaaagaacgtatgtagaactatttacaagttaccttcagtaattcagactggtgttacttctttgaaattttagcaaactatacaatctgtagaggagccttagtcgaatgcagtattctacttgtgttaatagtttttttggccaaattttgatgataatagttactttctattcttaaattatagacttttgtgttccctttgtcaaaataagttacatttataatattggtaataatataacatatcaatacttagatgtttaaatcagtttttcagtttccaacgtttgcttgtagtcatgtgcttctaattaaggttatgttttgtagtcttaatactggttttgctagaaaaaaattatcttttgctttacacttttgaatccctttctaatcaaattactgtttaaatgacaggtatatttttacccccctttacttctgttcctcttgacaccattccagtttgcaaacaactccagatcatctcagtatttactgtatgaagtggctctttatccagcatatagttaatttctgtaacttttatgtattggacctcacttttttgggggtcatgtaatgaggaacacatgaaatttgtgtgggaagagcctggggtaagtcctagcaaggtctgctctaatcctggacaaagtaatttcaacaaaggtctttccccctagatgttcatttctgcaaaacggagataagaccaagcacctcattgcatagttacaggttcacatgttgttagtgttgtaaattagcggtgtctacattttaagctgtgtcaatgtcagccgagcgcccttcctcaccggggtctgggatgagcccggtgtctgagagcccgtacctccagggctgccttccagggcccccacgcctgtgtctgtctgccccactccggttcaggtcccactctaccgggtgcacaggcaggcccctggctccaacactgctctctctccaggccccagacagaatgatcagatgacatggacttgcattaaggtcatactaccgatttaacaagtgagattttctactttaaaacggaagtgcttcagaggggtcgtggggtcagagaacagcagcaccactgataactggccatggtggcgaggtggggccgggaagtgtgcagcgcttgggtgagcctggttaggacgaggagcaagcagcttcggggcagttaccctcctgagtcaggccgtggtgctggtctctcgtcggtggtttcagaaggcagagtgccgttgttttgcttcacaggaggccctcagtaaatatttgttggataaaacaaaaggatgaatttcctcacccatcgctttagtaactagctgggtaatcagtggtgataaaacagggttcataaaaacaaaatgcacagtgtataccatttaccaagcagtaacaatatctctttcttaaaatgctaggcagttatcttagaaaacttgatagcttacgtttgaagtagccaataagaagagtgtgagtgtctctgctgttgtcaaatggaagtggcactgactgtcaaatggaggcaccgtggcactgggcggggtcccacaccaggaccgccaggccaggttgctgaaggcagcggggcagaaggagaaaggggaagaaaagggtggagagcaagccaagcagtaagtggggctgtcagccccttcagcgctttggttccttagatcagacctttctgctttgctctgtgggaaaatgttatttctcaaaagctatattctgtgtgtttttcttataaaaatgtatgtgtgtctgtgtgtataacacacatacatggcaatttttttccttatagtttgtctccactggtgcattttaattcaggttacaaagccgagatgcagaggccgcctctgggtgggggaggttcacacctccttccccagaagtctcccatgtctcgcctcacattttgaggaagtctcctagccatctctatgtaaattctgtggcaagtaacttagcttgtagggtaagactatccttatttcaaagcctccaacttgccaatcataaaagctgagcagcttgagtcctctgactgctgctccttcaggccgcacgccctccgcaggaggtgctgtgggcctcagtcgtgtctgactctgtggcccacggactgtggctccccaggctcctgtcccagggaatttgccaggcaagaatgctggagtgggctgctgtttcctactccagggatcgaacgtgtgtctcttgcgtcttctgcatgggcaggcgggttcttgatcactgcgctacctgggatgcctttcgaaggcacttcatgatcccggatccatagttttcaacccggtctgaaccgcagctcatactgcacgggccggagagcgggagcagcgcagctccgtgactgttccccgtggctgcgggagagttggggggttctgactgactgtctcctgtgttttggacccgtccactgcatgggagatcagagtggtggggaaaacagacgagtttcctgttatcgtgggatgtacattttagtgtggggtgctggggagtgagacataagcccgtgtaggtacagagggtcatggaagaaggcagtgactgctgtaaagaaatcaaaacagataaccttatacacagccagacagatggctgctttaggagaggcgtccgaaagggcatctctgagaagatccgcgttgagctgaaacatgttatgaagccagcaacatggtgatctggaggaggaaccttccaggctgagagagcggctgatgccaagtcctcagtgagagtgagctgaggatcagcaggcctgctcggggtggcagtggcggtggggacgtttggtgcgctgttccaccaaccacggctaggagtttgagtttgaccccacctgcagtgaggagcctggagggagctgaggggagtggggacccaggaggagggctggggagcctggaggagctgaggggagtggggacccaggaggagggctggggagcctggagggtgtgagcgggagtgtgagacctgggagagggtggctgctgtgctgtcggcgggggcagaagtgggtgcagcctctggaagggcagcgggggtcagctacaaggcggactgcaggcggtctggagcaggcgccagctgaggacgcgtatcggattattgtggctttctcccactcctcagtttggctccattgttaccgctgttagggctcttttcacctctcacctgggagtctcttgtgtgactctttcccttgactctattgacttgcttttcctgtccacctcatgtgttgaaccctgtttctctcagacacgttcctagtcctgcccctacttgcctgtctggaccttctgtgacctctggttttgcagaatatgtgcttatccagactccctaacacacacactgtcccttttcagactgtccagttacctttgtgttactgacttctagttcaattccactgtggtctaggggcaggcatcgtatgattcctcttctgtgaaatttgttaacctgtgttctgtagtccagaatgggatctgcctctgagaatgttctatgtgagctggaggagaatgcgtatcctgctttgttggataaaagtgacctgtagatgtcagttaggtccagttggttggtgatgttgcttagttcagctctgtccttactggtttgctgcctgccagttctgtccatgtctgatcaaagggtgttagagtttgcagctgtaatagtggattctttcctttctcctgggcttcccaggtggctcagagggtaaagcgtccgcctgcaatgtgggagacctgggttcaatccctgggtcgggaaaatccctgggagaaggaaatggcaacccactccagtactcttgcctggaaaatcccatggatagaggagccttgtaggctacagtccatggggtcacaaagaggcagacacgactgagcgacttcactttaattcctctttacagctgtgtcaggcttcgccttgcacagtgtgatgctctgttgtcagggggctcttgttatggcctgtgtgtcttcttgtagaattgacccctttatcattattcagtgcccttttttatctcttggctagtgttagcattggatattgttctccagctatttccttttaatctatgtatgtctttatttaaagtggttccataggcaacatgatgtcagattttagcacgattccttgtaaggcaagtctatggacaaattctctcaatttttgcttgtctgagaaagtttgatttctccttcactttttaagggtagttttatagcacacagaattctagtttgacaggtttctccttctcaagcacttggaatttttccgtccaccttctgtcctgcatggcttctgaagagaagttgaatgcgattcttgattcctctgtaggtaagatgaagccccaccattccccgcccgcccgccgcctttaagagctctgtctttgattttctgcagtttgaaaatgatgtgctgaggtgttgttctttgggcattggtcctgtgcggtggcttctgagcttcctggccctgcggtttggtagctgatgttcatttgggcagtgttctcagtgactgtctctccagatgtttctcctgtgcttttctctcttctcctctccccgtgagagcccttgaatgctctgctctgtttttttcagtctttttctcttgcttctcagttgttgaggattttgctgagacatcctcgggctcagattctctcctcagctgcttccagtctactcgaggactcagcccatcaaaggcactcttccctgttaccctgttttatacctctgaatttacttttggttctttcttaggatttttgtttcttgcttacattgcctgtctgttcttacatgctgtctgctttatccattagagccctgagtgtattaatcatacttgttttaaacccctggcttcataattacaatttctttggttctgatgcttgctccgtgtcttccaattgttcttcctacctccaggccttgtaattttgtgttcagctttgtttttatgacagctagatgtgactccctggttaaaggagctgcagtcgtaggtcgtttgcagtgtgatgagctgaggggagggggaagtaccctttagatggacggtcagtctcccgtgcctctggaccgtgcccttcacgtgtttctcgcatcgcccttcccctcaggtggacaggatagctgtggtggggttgggctgggcatttccccctccccagggcacttagggggccgatggagtctcagcaggttgggctctcggcagctcgttctccctgcaggcaggcctcgttcagaagagcagagtcccctctgtccaggttggcccctttcccctccccctgccacagctgaggggatttttctctggtattcactgtgggaacctggccaagcttctagaggtgaatctcacagtttcgtgtgggtctccctatggtggagttttcctggagtttttaaccctcagaggtaaagcccatgggcacaggagcctggtggaccgcagtccacggggctgcaaagaggtgctgtccctgtgcagcccctctgctccagtgctgcgccccctgctgtactgagtccgacagctcatccttcaagcctgagttcatcaccaccctgctcttgaagcatgttccagtctttacaactggaaaaaatttgtgcctgttttatgtcccagtggcattttcttaataactttgtaatgatattacttacgtttctttgatactgctcaagtttatttagactcaccagtgtagtcagtacatttgtattaatctccttggcattgcatgtgccaagatgaatatggcgtgggcccttaggaagctcacagtctagtagagaaagcagacctaaagaaacttccagagcaggagagcagcgctgcgctggagagaggacacgcaagagcgccaggaagcgcccccagcttcatgttccagtccgggaggcctgtaaatgttcccgacccatgaccccacccttacctgaggcggactgtgctgtgctcggttgcactgactctttgcgaccccatggactgtaccctgccaggctcctctgtccagagggattctccaggcaagaatactgaagcttcccttctccagggcatcttcccaacccagggatccaacccaggtctcctgccttgcaggcggattctttaccgtctgagctaccaaggaagcccaagaatactggagtgggtagcctatcccttctccagagaaacttcctgacccaggaattgaactgaggtctcctgccttgcaggtggattcttgaccagctgagctacgaaggaagcccctgcccacctcacggtgctcctctgtgaatacctgggtacgtttgctcagcactgaatgcagtgcacaggggacctcggcccctgctctttggagcttgggaaaacaagccaagtactctcccaggggaaacatgggcataaaatagtgtgaacagtttcctcatttctttcactttcattatattattatcagcatcaagtacttgtattgctgtaacttgcaagaccctgagagaaacagaataaagggtggaaaataccaggggaaaacaagcacctccctggttgttagcccaggcctcatctttcagacctctggtaacccctggagggcgtttctgtcttactgcagagtcagggtggtgcctaattaatgctcattgattgtgaatcctatcacttatgatcagtgtttttcaattgtagtaataacatctctaacattttcaatcttcagaaacataaacacacttaaaaatactattatccgccttctagtctgagtttaaacaagataatttcatcttgtaagctgtgtttttttctcattatagaatttatttgatctgagtatgtcactgaattaaatattatcttctctttcaactaattttaatattgttttattctactaaccttttttgcctcaaagggttttgtattcatttcaattaattgttccttatttcagcctaatgaggttgttactgttctcatttttattactgaatagggaaaaaactgataatcaaaaggtaaatcaagtagcttccaatttatagcatttctacttcagaacttgagccgtccattctgaaccagttttgccatgcttcaaaggcttaacattatatgaaattcactattatttaaaatgatgggaaatattgagttcagaataaagtatcatttccatattatatactaaagaagtctgttatttgatctatcaaggattattttaaaagtatatttacagtgtctatactatcatttgcaaattaacatatttataggctattgccaaatagtgtcatcttttcttcagatgcctcagatgcctctcttgaagtaaatgattaaagtgtagctcccttttgtcactgtgactgtgacgatatttacgggtcgggttggtccggtcgcctctcgggcccgcagccccagcctctggtctttcatggttctgtgcagggcccttgccgtctgcattccgcgaggcagctcactctcaggctcattccgctctgccccacttggttctccgagacacggtcagacctttaccagccttctcgttcgatgatcccttggtccaaactttagactctctatttcagcaaactttgtttcctcaattttttttatattgttatttgatattttgtggattcattaataattgctaaaactttctctttaaaaccatagatgtgtactgtccactttggtagcccccaggcacatgtggagatttaagttgaaattaatttagattaaataaaataagtcttcatcagccactctcaagtgctaatggctattgtataagccagcacagatataggacatttctatcattatagaaagttctcctggatagtactgtgaaaataaactgattgttgttatatttttgtactgtatatgataggaacatatgcattttattttttattcacagtgaacttttagagacggcctgtgcttaatatttacttttgtttcctgtctctgcccttaagaacccttcttgagtttttatagtatataagtcttatatgagtttttgatcaaatttagttattatgtagtggatagtgtaaaattagactactttgagaatgttttctgtattaataatatacaaaagtgattttacaaagtttttttttttccctccttatttaaagtccatcttctacacatttcccatttttcagagaaatgatgctggttctctaatccaacagtgattatcacactagtgcaaagttaagatatcctaaatgttggtgtgttttattctgtttcctcaaagccccccccgcttttttttagttaaataaaaaccaaattcctcagggaaagaaaaattttacaagcaatttcagagcagaattgattttggtgtgtgttaatgcagacaatctgcccagtgttaaaatgttaaagagaaaaaaaaccgcacaagctgccatgttcgtgtgatcacaccaaaatagcagcttgtatttatattttcagtctcctcgaggtggactgcaggcacaccgcgccgagtggctgcgcttgctgttgtgttgtgcttctgtctcatgccggcgccgtacacgcttgtgcatgcacgaccagccctcacatatgcacttgttcacagccgcggaagtgaaaacgacaacacaagccgctctctgcgggttgtcggcaacctgtgtgtgtgtttcttaaatattaaagggggagaagcagatttccaggaacacaagaaacaattcttccgtcaaatggcctgtagtccttccttatttcacaactcttaaggtaaaagcaaaatattggattctcgcggttccctctgtatatttagaagtatgtatatcccgtactgctcgattttgacatgtatttttctcatttctgctgcatgtaagcatgcagattcttactacatatttgttccaatttatgggatatttttaagcttaaatttttttctagcatttgtgtgaaaggaggtgtgtctgcggcggtcttggtgctgactgcacccgcgcccctggctcctggagcctgggggcagcggcggcccccagcagccgccgagtccgcccggagctgcgggccaggagggttctccctgggagatctgctgtgtaaatgaagccagcgtcttttaccactgtttatatttctaaactgcaggttcacatactgacaatgaagaggtgaaaaggtaaagtccactgggtggtggagtactcccttatgctgaaacattcctcctcggcccagccctttcagtagagtcacagtattttaggaactttcatggggatttggaattgacactactttactacttcaaggataaacggtttaaattgctttaaattttttttaaattgttaaaatactgcaaaatgaagtctttccgtgtgacagagccttgcacttaaagtgcatatttctgtctacttatatttttttctctcaatttttcacctttatggtaccagtagaaagatttttgttttttcttttatttcaagcaatgaggcagtggggttgcttgctgtgtaactctgggcattggagaactaggaagaacctttgctgacagcctccattcagatagtgacagacgtgccccccccacccccccacccccgacactccagtcccactgcctctgtccccactgtcattcttggacatttccagtcctcctaactcttctcacctggatggtgattccaaactcccactgtccctgttaggccctgggagattgttctgctatcctcttgggctggatcacacccttgtcatcacaacagatttgtactttcttttctatgccttttaaaaatcagtgttcacctctagtttatggcctgtgaaaattatataatgctcttatcgtcatttgttaacaaaaaacaaaggcagcagaactgtagtctagcctttagtaagctttgccttctcacctccagtccaagttcatgacttaactttcatttttcattagttggttggtttgtaggtttctgcacttatttattcattcagcaaatactacttgagaaattactaggtagcagctactattctaaaagttgaggatcctgataaagaaaatagtgcctcttccattcttttatagaaccctgcatattttattgtaattatattcctttttaaaaaatctgtgtaatatctattttcttgtctagattttaagtacttagttttatgtttttatatttttgctattccccagcacctggcatccataataagcattgtgtcattggtaatcatcttaaatcctttttattttgcaagtgcataaagttgaagctcagaaagaatgacttaagaaaatataacttgttaatggctgcagtgaaaatactacgtgggactccagtctttctgctagtctataatattttatgttaatcttatttgcctgaatttaccactttttttttttccaattcaagaagcttttattgaacaccttctgtatgcataacactttgtgagcaaacaggagatggaagcatgagtgggctacttcaagtcttagccagaaagctgtggagattaaatacgcccctatggtttctgccctctgagttcacctattctaatatagagttgctcaaccttgggagtattgaccttttggaccaattaacgctctgctgtgagaggctgtgctgtgcagtgtggggtgcttagcagcgttcctgacccctgactactgcagcctctgtcaggcctactttttaggtctttccagagcatcggggtgtcttgtctgacaggagggttctctggggcaccactttagagttttctgagagcctaacaaaggattttgcattcacactctgggttacacctttcgaccttgtttttctgtgtcttatgtttgatcttggcccagaagtagagtcttactgcttcgtgtgtggctggagagggtgagaaggagacaaggttgggcttgaaatgcctgtgtgttaagcagcccttccctctgcttcccgctttcctttgttgtaagggtcgtgaagccaggcggcagctccgcactgcctagacaggctcttgggccccatcacctgtgtattgggtacatttgcgatattccaaataaacaggctgctgtgttgctagtacccaacaagtaatctttgtctccacttttcttacgatgttttcctcactttgactttcgcccttgctggcagcctcatgggctgtctggctggctaaccgtctctctcagatcctttagtcttttcactgtggctctgtgcgacgttccagctcctgtccaggcccatagctacctctactgcatatttaaaaagaaaaaggaaacagctcagtttctattaaaagctgagttcatgatctcttgctacatatttcatagttgttggacatttgggagcagccgaggccctgggacctctgagcgtgcagtcaggcgtcagctggagccggggtggtgtggggctgctgagggctagaggacccatgtgggtctcctttgtgctgcgtaagtgtcctttctctagaggagtcttcccctaaagcaaacagcccaagaaggaaaggcagtgtgtgcaggagttggcaggtgtagttttaagccagcgcggtctcccagcttccgaagatgcccttctccgctctgtctagccggaagcggaagtgcgggcggcgcctgcggtgggatgcgctcaggagccgcccgctgtgggcgcctggcatggccgctctcccagcggccgcggctccctggagaggatgctggggcgttcagtccagcttcctgcctggaaagaggagagggcagatttggttgaatgcgggtggtgaagccgtcatcccaagcagggaggacaggaatcgaaagcagctgtcctcctttcatcccggctctctgggttgcttgatttttatttcagtttttctttaataaaacaacaaactagagtaagacattatagttattttggtgtttaatcgtattctagggagttttcatcagctcattttaaattttagatggatgctggtggtggaagttctgggtttgaagtgtggacacagcatcagttattgttcctgcaagccctccggtgcggctccatcctcctgcttggcgataaaccttcaacaagggctttgttttttccctcggggcatcttattgaatacttgcatcttcagtaattcatctgggcccagtgctttgtctgttttaatacttctaattacctaattaggtgccgtaacgcagtgacaaagccctttgtcatttcactcttgtcttaacccttttcttgcttaggaaacattccttgtgtctctttgttgtctacggaactctccatcatggatacacctcggatatttgcctggctccctttttgtctgggtcgtgaccagccaggccctgttgagatcaggtcttcccggttgactcgcatcaggaacctgggcccctggttcttggtctgaagttggggtttcgttgtcctgcctctctcacttcttgattcacccccgtgccctgcagtcacatgggaagatttccagaaagcaagtggaatagttgtcataaactgcttttgtgacataattagggccattatcattcatagatcttaggtgtccacaggtatccatgagtaagtgtaatggaaatcaacagcattgtttgaaaattatagtgatctgtgcttcaggataactaaaaattgacaagggtcagtttttcttcatatgtgtattttagataacagtgaaagaaaacgtgatagaattatagttttaccattttacaacctctgatgaatcagtctagacagtgatcatcagtcgtcacagaaagagagaaaagctaaaaatctctgcctcccgatgaaggcacccggcaccatctgtacccgttgtccacttcaaagcttaagagaacagcagaataaattttgttgataaatctctgacttgaggagggctgagcaggctgtttttctctgttccatgtggtggtagccagaccagctcaaagtttaaggatcagaaggcatgtccatctgtctggctctcgaggctggaactcggcagagacattctctggagctggagctggcacacctccccagggcctctcgtggctgcttggcttcctagcagtgtggtgtctgggttccacagctgtttgcagacagggagatggacagaagctgtgttgcagcattgctcgcgttgccatctctttgtgagaagcttgtcactgaggaccatgcctgtgcagaggggtggcgttaggctgccccaccgctgtgtgggaggagcgctgaaggattctggaacgtgcgcttgaagcgaccgtatcttccgtgaaggtccgtgtcgaaagttgaatttgaacctgttgaagtctttagacctccttactagtttatgggaatacagggagatgaggaatgtgttccataaaatggaagatcaggaagtaaaattaagaatgtgggaagtttctacagggtaaagagtttgatttttctaacaaatgcattgtaaaagagagagggagaaagaggaagggaagagaaggcaaggaaggaaagaagggacaagtcggtggaatacgtctttagagagatagcagcaaatttcagtgtacagatgcttcttggaacttgattgaaacaaactgaaaaacttttagggaaatttgaacatttgactgcatatttggtttaatcagtcgattatttttattagttacagtgttaaagtagtactgtgattgtgtttttggagtctttatattttagaaataaatgtgccctgaagtattagtgacgtctcagggttgcttcgaagcgcagtgctgagagaagagaatccatagaagggaattattagtcatgaagctgggcgactgtgctggggttcagtccattattgtctctctataaatgttggaattctctataatgaaatattttttaaacttgaagtctgtattgcctacgaatttggagttatttcaagttacaaaacaaaatgcatacaccagatgtttatacctcttggtgttaatttacagtatataaaatttgtctttaatacctacagaaatcttgagagagaaactcctatactttaaatgttgatcagttaagttgaatcagaattattacctttgtttctatcaagtaaaaatgttagatgatattagtctaaatcccatcatgaaatactttgatattcctttctctttgcttatcagagttcatcctcacctatttaccatctctactttcttttttggctaaattcagaaattccttctcttggactctcattttctaatcataacagaattcatcttcagttcccatttgttgtgcttcttttctcctttttctctcttttctgatggtttgacttgagtgaatcataaacttctctagttcagtcataaatttttttctctatctcatctttaatgaatttaccaccatttctctttttgcatgaaactgcaaagtcactcttgatttttcaaaatcttaataattttgatcccagcctcggtctgtattctgtgattttgctattgtttcaaaagcagatttttccttcccaatgataatttgggttagactgctgttcagattacctgccctgaatcaacaccagatgtcagggaagctattttgaagcttaaacctatcatcaaaggtgtctatcactattcctagaaaagctgctcactgcttttctccctttttatttctgattcctgtagatagaatgccttctcacttgaagcttgataatacaagaatcaagtatttttttgtaggaaatatgttattattcaggtgtattcatcaaccttatgacttgtaggttcttctgtgtaactctaaactcatgaaattttactccactgcctatctctgattcattgattagcaaggcagttgagaggtactgctactctgctcactacccaggtacactggagcaggtgttaacctctctagtttgattcttacctattaccttctgagccagattctttcagctggtaacttctgtgaatgtcagttcttccagattctgaaaatacataaacttttgtctctgtttcagaactcttctgaaatctttcacaccttacttgtttcatgctatggattcttcatcacaatatagagcatctcatacttttctgaaaaagagggtatcctgagacttcataaatgcatttcagtgttgtagactagactcgtggacagtgtgcagtcacacagctatgccctgtctgcctaatgcacattttcagttgattgggtatttgctaaaggttcagttcagttcagttgctcagtcatgtccgactctttgcaaccccatgaattgcagcacgccaggcctccctgtccatcaccatctcccggagttcactcagactcgtgtccattgagtcagtgatgccatccagccatctcatcctcagtcgtccccttctcctcctgcccccaatccctcccagcatcacagtcttttccaatgagtcaactctccgcatgaggtggccaaagtactggagtttcagcttgagcatcattccttccaaagaaatcccagggttgatctccttcagaatggactggttggatctccttgcaatccaagggactctcaagagtcttctccaacaccacagttcaaaagcatcaattctttagcactcagccttcttcacagtccaactctcacatccatacatgaccacaggaaaaactatagccttgactagatggaccttagtcagcaaagtaatgtctctgcttttcaatatgctatctaggttggtcataacttttcttccaaggagtaagcgtcttttaatttcatggctgcaatcaccatctgcagtgatcttggagcccccaaaaataaagtctgacactgtttccactgtttccgtatttgccatgatgtgatgggaccagatgccatgatcttcgttttctgaatgttgagctttaagctaactttttcactctcctctttcactttcatcaagaggctttttagttcctcttcactttctgccataagggtggtgtcatctgcatatctgaggttattgatatttctcccggcaatcttgattccagcttgtgcttcttccagcccagcatttctcattatgtactctgcatagaagttaaataagcagggtgacattatacaggcttgacgtactccttttcctatttggaaccagtctgtccttccatgtccagttctaactgttgcttcctgacctgcatacagatttctcaagaggcaggtcaggtggtctggtattcccatctctttcagaattttccacagtttattgtgatccacacagtcaaaggctttggcatagtcaataaagcagaaatagatgtttttctggaactctcttgctttttccatgatccagcagatgttggcaatttgatctctgattcctctgccttttctaaaaccagcttgaatatcaggaagttcatggttcacatattgttgaagctaaaggtgggtagtttaaattatttacctgcagtttgattcttagagatctctagtttttaatctcgtgagtggttagtatgcatttaaatgaaactgtaagttgacatgtaatataatttacatttttagtagttaggtattaaactctcatagttcatggatatttgttacaaagtgaatattgtagtttttagcactttctcccataatccattcagattgcagcatccattgggaatttggtggtccagtgtgcgtagacaatttccaaagtggtgttaaagaagcagacatagaatcactcggccatgtgacctgtccagtcctgagataggaagcctgcttcactgcagggctagagttaagtcatccgatgagcacggagaggaaaccatttcacctcagaaggattactctgtttttactttagtgacataagtttttccagaaaacttcttctcagcattttattaactagtcacctgtctttcatcctgattactctaatttggggtatttgactttctaaagagtttagcagttttcttttgtcctaaataagtcatttaacaagctttggtatgtatctcctacttcagtttttttgacactttctggaacttctttgtcttctaagatataatattattcttgctctgactctactttcagataatttctcctctttaggaactccaacctgagtctgggctatctagagggccagcacactgagatttatgcatggatatgagataccccatggactgtttcttccaagccccagaagagaggcttccttactgcaggagaagagatcagactcctgtatctggggacaaactatatacccacaggaatttcaagccaaagtcaaatgaacaggtgaagatgaaacaggctgtaatttattataaaaattagaatcaggaaagagatgcctcacaaaccactagcgtaggccacacagggtcccagcctgaactggaaagaaagttctctcacaggggccctggagaggatcagaaggacacagaaaacagctgagctcagcagcgataggaagcggtagagtcggcaagtggctgacatggccgcgggtgtgcctctggagactcaggaggactgctcttctgatgcggcccgtgcctctgtgctctcggtctccagcctcccgcacgcactcatatcttcggtccccaagccgcctcattcacgcgtgcggcatgtcaaatgcccatcctcaggccagcagtggcctctgagctggaccgccaggcctgctcctgccgctgttgcggtgtctcacctggtcccaagagcagtgtgatcatcccacttcagagatgaggccgttaggtaactgtctactccagtcccgcagccagcagctgtgcagcaggaagctgaacccaggcccttctcaggcctgtgactctccatctcacctcagtgtaatatcctcctctccttcctctaaacctctcctcttgcagtcttttttccaaattagagtccctccagtactctcttctttccttttggcttcagaaacgtagagtcatctgttgctctccccccgccgtaatgctgccttggaagctcctgtgtgcctcccgcctttcgtccgccctgtcatcctgccccagccggtggcacctcctggaagcacgtgccctctgtgtcactagcaccacgctcggaatcgagcccgcacggctttccttctgatggggtgacctttcccacagatgatctgtgttcctcttctcctaaaaattctcgttcagaccttttgtgattgaacccatttgactgcttatttctgtgtgatgttaggaagccttctaatcccattcttttacccatgctgctgctgctgctaagtcgcttcagccatatccgactctgtgcgaccccatagacggcagcccaccaggctccccactgggattctccaggcaagaacactggagtgggttgccatttccttctccaatgcatgaaattggaaagtgaaaattgaaagtcaagtcgctcagtcgtgtccgactcttagtgactccatggactgcagcctaccaggctcctccatccatggggttttccaggcaagagtactggagtggggtgccattgccttctccatcttttacccatagctgtccggtattcccagcaccacttattgaagaggctgtcttttcttcattgtatattcttgccttcttcatcaaagataagatgcccataggtgtgtaagtttatctctgggctttctgtcttgttccattggtctatatttctggttttgtgctggtgccgtcctgtgactgtagctttgtagtatagtctgaagtcaggaaggttgattcctccagctctgtttttctttgtcaagatttctttggctattcagcatcttttgtgtttccatccaagttgcaaatttttttgttcccagttcagctcagtcatgtctgactctttgcaaccccatggactgcagcacaccaggcctccctgtccgtcagcaactcccggaatttacccaaacttacgtccattgagttggtgatgccatccaaccatctttttgttcgagttttgtgaaaaatatcactggtagttttatagggattgcactgactctgtagactgctttgggtgatagcgtcattttcccaatactggttcttccaatccaggaacctggagtctctccatctgtttgtgtcaactttgattccttcatcagttttctgcatacaggtcttttgtctcgtcaggtggtttatccctaggtattttatgcttttcattgcaatggtaaatggaattgtttttttaacttctctgttgtttcactgtcagtgtgtatgaatgcaagggatatctgtattacttctattatatcctgactgattatttttggatgacattcattcttaaagggtcatctcttggtattcatgagggatggagtctgggacttccacagataccaaaatccatggatcgtttaaccctcttgtatagaatgcagtaatattcacaaatataacctatgcctatcctcacataaatcatctctagatttcttataatagctaatacagtgtaaatacttgtgtaaatagttgctggcaggctggcacgttcaagttttgctttttggaactttctaaaatttgtttttcctaaacatctttgatccatggttggttgaatctgcagattcgaaagccacgtatccactgggctgagagattcattgtgtattgcagtcctctgtatttgctctttgggttattgccatctttcattataaacaactatttaagctcctttcaggtgaatactctgccctttttatttccgactacctcaaagcacctggtagaatttttgatccagagatcatttaaacagtattgactaactcattccatttaaagtggtgttttaatcaaataaaactaatggtgtggtaatgtataataatttaaattctgatatttgcatgaaaaaaaagataatgattttttcacagagttggtatttacaaaatcacgttacaccaaatgggattaaacaaagcagcccccccaccaacagactgaacctcatacaaaatcacgttacaccaaatgggattaaacaaagcagcccccccaccaacagactgagcctcagttgcttaaaaacggtttattcctcatgtgatgatcttaagcatacgaagacgtttgaagtgtttaggtgtcaaaggtatcccttccctgtgtgatacagtaatctcccttttctcatcctttttttctttaacacatcagtcccacctctggcataagttacatggcaaataaagacttgtactaaaaccaaaagccgcccttggcacctctcagagatgaaagtttgagggtaattcttgaaattgtgttactcaatttcagtcctctgttttcttttttcaggtttcctgaaatgcagtttttccaacaagaaagtgtgagaaaaattcttacagatgttcttttctgttatgctagagaaaacgagcagttgctttataaacaggtaatgaaaatatcgtacaggtggcatccattgactcagaattttctatacagcttgacaaatgatagagcaataatgtagcctttattgtatccaaagttgtatcataatagtaaagcaatcaaagagctgcttgtcagctgcacggtgagaaaagtaagctcgctagcgcacatatgcttcttccttattataagacattccgccaaattgtcttctataaggcattcaatctcttctttcaacttttgggagtttgtttataaacagcatctttgaaggcaatctagtaataaaacttttcagagttgtatacataaatattgtttctaagcacaacatttataaatgcatgacatgccatgaggaggtgatcaagtgtccttttactctttaaaatctaccaataatataacttcagaaagttcctttaaacttcctggaagttatgtgatattcttgggatcttgatgtttaattcatctcataattaaagaaggttattgggttatgtgtattcattttgaaatgtaaattatttaatatataaagaagtatccatgtttctacttaagctaatgggcttccaataaaaatacacatagttagatactttaatgtatctcaaaatacatgttaagtgaggattcaaactattaataaattctctgacaatccaaagttgttatgtccactgctgaccacccaaattcagtgtaacagaaaacacccgcatggtgagagcagtgtatttataatttgagataaacttgatttatttaaagataataaaccaagtcatattgcagttgtcctaaataatacatttgttattctctacatggaaatatgcaaaagaactaattttattttagttttaatattactaatatatattttatattaattacatggtggtaatgagcttttaaaatgggaaatggaaaaaacgtatcctgttcttaatggcaaccaaaactataaaatgtctaggaataaattgaataatataagaataaaagctatataaagaaaactgtaaatgttatagaaggatataaaggtagagttgaataaatagaaaagtgacaacatgtttctaggtgggaagatactaagtaaaggtactatttcttcctaaattaacatataaatgtgttatcattccactgataggctaagtgagagagagatagtttttttaaaactggacacagttattttaaatttagtgcccaaaagctttatagtaattttaatggcaagaaagaacatagcttactggttgcgagcactgggtctagactctgattccttcatttgtgtctcagctctaacacttcttagacaacacatagacttgcctcttctgatcttaaagctttgctgatgagggcagtgctctgtagagttaaaagcatgtagtgctccttatgacttcatgttggtagttaccgtggtgatcatggttacagtcattagtaaatttgcttaagttgccacagaatttaggggaaggggagaatgacctaagaagacatgaaaactgttataaatgttacgtgatgaagccagtgtgacagtagtgtggaaaccgagagagagatcagtggagaaaggtaagaacaggtccaatcataagtgagagcttcatgtaagatatagggcatttccattcaaggggagaaggacatcgaattgctgtatttgactttccatctagaaatgattaaattaaaggtataattgtaagaactaaaactacataaaaattctgggaaaaaagaaacatttaggagaattttttgataacctcagggtagaaaaggccttccctagcaagatatgctgtccagatcagacccaaagtgcagaaaccagcagcaaaccagaaaggagacagggagaaaataaacctccatctgtgtaagattttttggaagccagtaaaagaaaattctagtaagactgacttaaaatctaagcaagttactaacacacttgcaagaagtcgtcaggcgcaggctcttcgccagtgatcctagtttgttcccgttgttctgttctctgtctcattttgttgccttttgtcgtcaagcctgtctcctccgtcttctctctcctctttgaaatatctgggagtatctcatgatgaaaaatctgatgataaccaatgaggttagaatataattatgccaagttatacgtttgtttgccctttttctttagagaaagaaacaactagattcacggacaagggaaaaaaacaacacattgtaattgcgtggtccaccgtttgtgaggcacgcagcacgctcgtttgtgaggaaggctaaagagaagcggggcagaccagacacgcttgataacttagacaaagcctatcggtcaccgagcaggaaactattattaacttactgctgagcatcaccttctaagactgaaaattactccctatacatgttaaagattctatagattctatagatgtagaaataatcccttactctaagaggattggatatttagccagatcaaatttaagaaaaaaccttgagtttcatcacaagctgttaaagctattattttgtactaggtgacaccccgtttaacatcgaccatattgttaatagttatgggattttattgaattaatgagactgttatcatgtagtagaatgtcttgctgagttaattgaaactgcagagattatataaatggtattaatgaactttgactgcctgatgcctcagctttaataaagactgcttggtgggctaaatgaacacaggcagataaaagaacaggttcaatttggtgagcctacaggctgttgatgaggaaaacttcgttaccttcattttgaactgacatgagtttggagagcagtgactgctgaggatccagcggtgagcaaggctgtaagcaagcagaaacactgacgtgcggatggaagcaaaacacacattgtggaagccaagagtatgctgatgacacatttcttttctgttacgttttatcagatttacagcacattgcatttattatcattctttccagatctcttttcatttaaagatgtctatttggttgtcaattgtaattaataatcaggttttactagtatagaactgagagtaagagcaacaattttttccaagtctgttttagaaaaacgtacctagtttagttggatgtgaaccctgaatgtgtaaaaggctgtcttagtggtattcaggggattctgaattttacaattttgcattgtacaaaaagcattctttaattgacgggaagtactgaagtataactcagtccaattcctttccagtttcaccatattgtagctttcaccagtgtgttgctaaatgcagtgtgtgcccctctagtgggggctgctccactcatccagtcactatgcagtgagcaccggtgtatgccgagcacatagtaggagctgggttttcctaggtatgcacggaggcacatacgcatgtacgtagacatatatgcatcacttgccaagtttatcaccacaaagtacttccgtactcatttgatcgtgtgtcttgctgtccagatcacaggctccataatggttgggaggtgctcactccattcattttcgtgttctcaatacatcataggtagttaatggataatttttggaataaataaaagtaaatgatgtatgggcaaatgtagactctggagagaggtcacagaaagtggagggaagagaacattcaaagaaagtgagaagatgcatttaggcaagagctgtttcttactagaccatccatacatagttttaggaaacactgaagggaaacgttccagtccgaagaccactgacaccgccaccaacagcgaaaacctcgtaaccagcctaagaaaaactatgcagctttattacatatttttggactggaaaatctggtgttcttagaaatatctattctatttaagttaatacaatcacagtaaaaaatagtttttgtctagcattttctgtaactaattacattttcatttggatgaaaaaagttattagaataggcaaaacagctttgaggaaaacaatagaaaatatggggaaatggagtattgtgcagctcaaatcgtgacagtagtaaagttcttgttaagaatgtataaattagtagaataccagtaaaaacaaactgagaaaaaatgaaagccaaagattcagtttatgataaagatgacatttcagaactcttgtgaaaagatggattattcagtagatgaggattactcaataaattagtttaactcttagggagaagaaaatgcatatttattcttcagggcaaaaacaaattccagatgggtaaagaattagctgtaaaaaaggaacttgtaatttaacttaatctcaatatgatgaaggtttctttcgcatgaaagcaaaagaaattataaaagatgatttattgatttgactaaagtatatggtttcactttgacatgagatatcatcaaaattaaaaggcaagttataaacatgggaaagtatttgtaacaaaaatgactaagggtagggaaaaggaaactcttcattaagcgaaaaacgggcaattcattaaataaaaatggccactaaaacgtttgtgttcaatctcactagcatttaagtaagttaaaacaactgtttgtaaaacttgatgggatctttttaaaaaacactacaaataaagatgagagtgtatgaaatggtttggggagtttcatgtcttaaagtggggatcatttctaaagggcagattaattgtatatatcaaatatcttaactcgtttacccagaaatttttcttctagggagtttatcccaaggaaaccaccagaaataagcaaaaacattactcaaggacgtctgtcacaggtttcctttcttttttggacttctctccttgcttttttggccttccctcctgtcttttttgttgtttttgtttgtttgcttttgcttttctgtagttctctacaataagcacctcttactttcatgattaaaagtatgtcactcagttttttgaataatttgagattattccagaataataagcccctggtaatatttttaaaccactttagcaacacttcattctttctgagtctaccaagttcttctaaggagcagtcttttcaagatttgtttagtaggtgatgtttacctaaaaagattgaagtgatgtgtggtaatttgtcctaaatcacaagtaaaatgtcagtgggtcctaaattattttgtaagaatgtcattaagcctttctaattccaggctggtgaagacttgtcagtgaactctgacagagtttccttgtgggttacttagtagcacagagctgctagactggtgcagaggactgtgtggctgtccctcacaggaggttttctttaatcctgttagcaaagagaggagattttattgttatttcctgaaaaggtggggttttgtgttgtcttttttcaagagatcatcttagataaaaggaaaatagtaattgactcactttaaaaggcagaaaagagtataatctatttttaacttgctaaaatatgcttttgatacctaagtagggaaaaaaaatctcaactgatctggaatatcttattttttcacaataatgggtaaataatggatttttataataacctttgaaaggcaacttagtaattaatgcctttttgtttctatttatgtaatccatagatgaatacaatgtaaggacaaaggaaattatattggtgaaatcactaaataaattgaaaagtaaccatatagttaaaataggaaaaagaattatggctatcttggcttaaacacctttaaaatttttactttgaaaactttgtttttcttcatacctgctaaagattatttcctttattatccaacatttccagctagctgacttcagctcttcctaaatctacagacatcctaattttgagccattatataatgaaaacattggatgtaatttccttaggtcttcagttcttagttgcccttcttactacagatctttacactgtagctcatgattataatttgcataaatgaaattcatatttatgagtacagattctgaagcaactgacaggtgcaaggttgtctaccatgccaatttattgtttgttgtgttattcaaaagagagctgctctccatgttttaaagaagaatacgtgctgtggttgaattggaagtcagattctaaaactaaatctccttttgtagttttttatgtttttgcttctgtgtataatatggaaattctggcggtgggggtcagctgcagggctctcagctgagccagttctgtccactggtgaatcctcagcatccgccccctcctttctctgttccagggaatgcacgagctgctggctcctatcgtcttcaccctccactgtgaccaccaggcctttctccatgccagtgagtctgcgcagccaaggcaagtttttatgggagctccatctatttttcagccctgttgtaatctttttttttaacctcaacaccttttacattgaagattttgtaaattgtaagcatttgtttgtggttcatgtgtctgaaccacttagtaattgtaatcctacttcagctatggggaaacttggaattctaaatatttttcaagtcttagagctataccaaaggaagacatatatctaacgaatcaggaagagatttttgttgcaatggtgaagtgctaacagttgttaatattcatacattccatcatacagtgacccgttctctcacactaagctgtaagagaacctattctgagacgtattttgtcctccccagatccagctcaattcagttcataaacagaatagtttcacagagaaccccaatttaaagaaatacaaatgacttcccatgttttttagatacattattatttccagcaaataacttcagtaattatatttaacttgggctgattgttagaatttattttctaacttaagataccctcactaggtgggcaggagaagcagccaggaggcgtcttgggaatggagagcctaggggctggaaaccatcaggagcgttcgcaggctggcccctctctgtgcaggaaacagagaatcagcatgtaccatttcacctgtctgtgcatacagtctttgttaatcgaaagcagccatccgtttcgctgaacacgtatcagggcatttgtcaaatcccctctagtttactatattttagggtcgtattttctagctccttggagtttttccagttacactggctgtattggagaacttcttgaatctgactataataactgtgtcttaattgcctttgcctcagttagcctaaagtatgatgaggatgcagttagtgttgagaccctcttctcagggcagttctatcttttaaaaaatgtacatgcagaccatacttcataggaaagcgcacatgatggagagtagctttttaaagaagagcttttaaatgagttgggcatgcttctttaagagtttgaatcctctataaagaaaaagcagcactaaaatagatttggaggaggtcactgattgatactaaaacatgttaaaagtagaagccactgaaggaaaataaatcaatgttttgatatgggatctatgaccagtaattacatattttcttgtttcatttggataagtgatagattgtggagcaatcagttgattctagatcaggcacattcaaagaatgtattgtcacatccagcatttgttatttggaataattagatagttacatcactgtggtagagacagggaactaatttgttttcgatctttgtagaaagaaacatttcatatgttaatagagttgctctttttatttaaaaaaggctcatgttttttcctttacacattatgtgaaagctggcttagagtatagataaggcagcctctgtgtctctctctattaaaaaattacacattctgatcgcttgcattgctgttttaagtgaggaaatgaagactctcctgaaccctgaatatctggaacacgatgcctagtaagtacaaaaacttttcggtcatttttattttttatgctatttttaccttaatgaagatttaacattagcattatattgtttttctgatttttagtgcaatgttctcacagcttatggaaactgctgaaccttggttttctacttttgagcatgatggtcaaaaggtaattatagtacaaatatttgcaatgtatttgagggaacaaatgatttcagtaaataaaagtgtaaaatcagagaccaaagcagttattatcactataaaaacaacaatataaaaatgcctgtgaaataagtttgaactggggttctaaatcatgcctctaattattgacagattgacaagggtaatataaaaattttcgtgtaaataaaatagaaactttcttttatatgtgtgtataaattatgcatgcaatataatttcttaaaaattgcttaaaaattttgaatgagaagtgtattaatctacttgatctcttctgtgaatagacaggccctgaagtatgtaggtaaactgtatcaagtaggttgttttatcaatgcatcactaaagtgaattgatatgtttagtggcaataatatttatcctttctctcacctttattctttaagtgttttttgtgaaatgacataccacagtattcacctttttaaatgtacaatttagaggtttttaatagattcacagtgttggtgcgtgcatctctactttctaatttcaaaacatttcggcacctaggaggaaaccctgtcccactagcagtcacccctcatttcccctccccagaacatcgggcatcactagtgtatcctctgcttctttgaacttgctattctggaccttgcacgtaaatggaatcgtacaatatgtgacctttgtgcctggctgttttgacttgtagcatgtgtcagtagttcatcccttttcatggctgaataatgtttccttgcatacatatatgtcacattttatttttccatacgtcagttggtagacatttgggttcttttcactttctaactattaaaaataatgttgctctgaacatttgtgtacaaactttttctgaacatatgttttcatttctcttggcatatctctaggagtggaattgccaaattaactgtcattttaaacaaatatatatgctaacttagggatcattctggccttttcattgttattgcacaatattgggaaaattgcagattattcggacagggtctgttgtgttaagagttctgggtatattattttctctgtgactaatttcttttatattagtataattgaatgcgttctggttagaaactgtgtatcactcagttctttcactttatctcttggccaatgagatggataactaatgctttttatgcctttggtcgaggtcaggacgaactactgcctgcaggccaatttggcctgccatctgtttttgtacagcttgtgagttaaaaatggttttacattattaaatgattgaaaaaatatcagaagaaaaataatattttgtgacatgtaaattacagggaactcaaatttccatgtccataaaaaagtttttttgggataccgccatccctatttgtttacatactgtcttcagctgctttctcattacaaaggcagagctgggtgattgcagcacagactgtgtggcttggaaagcctcaaacatttaccatttttgcagagaaagtttgtcaagtcctagcctaagtgataaagtcttcctccagcaatgtatcaccatgctctattctgtaaggattattagagggaaagcgtcctgtaagcacatgtgataaacagtgtattttcagcaggtgatttggtaaagacatagatttaacatgaaccctcagattttgagcagaatatttgaatatattttattagaggcctcatgatcattttacacagtggtcattgtgtgttttataactgattcagagtatctgagaagctgaacgataaaatgtgagcgctgccactttttacttttacttatccacattgctttcactgaatcatatgaaaacggctgctgctgctgctgctaagtcgcttcagtcgtgtctgactctgtgcgaccccatagacggcagcccaccaggctcccccatccctgggattctccaggcaagaacactggagtggggtgccatttccttctccagtgaatgaaagtgaaaagtgaaagggaagtcgctcagtcgtgtccgactcttagcgaccccatggactgcagcccaccaggctcctccgtccatggatgttccaggcaacagtactggagtggggtgccattgccttctaagactacacaaagacacttgatcagagaacacatggacatgccctctgagaatctgtgtccattacttgtgtgtatcagtgcctcctgtgtccctaaaaagcatatctcatgactccctttgcatcctaccttttgtcttctgtttcatgattctgtcatcttttaaagaagaagtttgagaagttattatatccctctatcaggtcttctaattccatggaaagttcagccatatcgcggtgcctgccgcctcgttcagtagcgctcctttcacaagccttccgtgatgacggaggcaatctgctggtttcatagtggtgtgaagtcgctgtctcactgtgtccctcactttgtgtcctggcactcatctgcaaaacccactgtgcctgccactgagaagtggttagaaagttctctagttctgttggtagttgtgtttgtctcatcaaatgagatgaggcaatcacagctttatgttaaatgtaggtagcattctttatcgtaagaaatcctgaagattagtgtttttcattaactctatctttattgtttcaattttcctattagatatgctatgctgtttagcatttaaatgaccagagagattgctttcaagatttttaaatttaagagattttattatattaggttggtgcaaatgtaattgcggtttctaactggcaattttaaatcattataattagggtcaaacacaactttattcaatcaacacatctttgccaacaagaaatgtttgtttatttctgaagcataaaaatccataccttgggattcagcaaactcttagaaagcattttctgccttctgctggttgtggaagcattttccttgcaaaaaattgctgagatggttgatgaagtggtagtctgttggtgagaggtcaagtgaatatggtgggtgaggcaaaagttcctagtccaattcattccacttttgaagcgctggttgtatggcatgcagttgggcatggtcaaggagaagaattgggccctttctgttgactagtactggctgcaggcgttgcaatttttggtgcatctcattgatttactgagcatacttctcagatataatgattgcaccaggattcaaaaagctgtagtgggtcagactggcagcagaccaccaaacagcggccatgaccgtttttggtgcaggtttggcttaggagagcgcttggggcttcttctcgatccagccactgagctggtcatcactggtggtcatataaagtacactttttttctcagaaatggtttgttgttccatagaaaaaaaaaagacgacacttcaaagcaatggattttttttgatttgtggaccactgataaggcacccagagaaggcaacggcaccccactccagtactcttgcctggaaaatcccatggacagaggagcctcatgggctgcagtccatggggtcgctaggagtcggacacgactgagcaacttcactttcacttttcactttcatgcattggagaaggaaatggcaacccactccagtgttcttgcctggagaatcccagggacggggaagcctggtgggcttccgtctatggggtcgcacagagtcagacacgactgaagcgacttagcagcagcagcagataaggcacctggacttcccaggtggcagtagtggtaaagaacccgcttgccagtgctggagacgcaagagaaatgggctggctggtcattgttaacttctgatggccagccagtatgccctcatcatcaaggctctcatctcctctgcaaaacttcttgaaccaccactgtgctgtatgttcattcgcagttcctgggccaaatgcactgttgatgctgtgagttgtcttcactgctttacaactccttttgaactcaaataagagaatcgatcagatttgtgttttgtcttaacatcatttccatgtgtgtgtgctcagtggtgtctgattctttgtggccccgtggactgtagtctaccaggctcctctgtccatgggattttctaggcaagaaaacgggagcaggttgccatcatctccagaggatggatcttcccgacccagggattgaacccgggtatcttgcgtctcctgcactggcagatggattctttaccactagcaccacctgtgaagtccttactcctatcattttcttagtctaaaatgaaataaatgtaaatacccagcaattagtgacattagcataaaaacataaagtgaaaaagacacactaaaataatgtataccataaccatatttatttaaatacatatcaaatggcaaagttcaataatgcaaaactgtgaatacttttgcaccaacctaatgaagtattctgttaggggaaatctttttaagttaaagcatcctgttatttgaagagagtatactagatgctacaaaatcagaaaaaagataattggatatactatttttgtagtaaatgatggcaatatggaggtttccatttctcttttatatataaattagcaacgagttgagctctaaatattaatgtagtcttctgacctttggacctaagtacactagagcaggcactgtagaaagtccaaagggctgtgtttcattttaagactggaaatgatgctgggcagccaggtggaaccccttcccataaacctcctctgcccttaacaagcgccccccctcctctctcctgagctttctgccaccctgcctagtcacgactctagggtgaatttccaggctttttttctgtgtagttctttcttccaaatggtacaggcaagagctttaccttctttatgttgctgaatctggtccagtgacaaaaagctgatactccttttggagatctcacagtttaggagacagagaagtagcaaagcagggaagatggactgaactgggactggacacttgagccaaatctgacagcacacgtggggaaaacacgtcaggggaaacactgggagggatgcttcacgtagagaatggcagaccagggtttctgcaagcacagtgagagcaggctgaccacgtgagggaaagactgcccacctggctaaagaatttggattgttttgtttttcctggagtgaaaataatgaggccctcttaaaaatgtctaaggagggactctgccatcttgtgacttgtatgaaaaggcaaaaagataggaccttgaaagataaactcgccaggtcagtaggtgcccagtatgctactagagaagagtggagaaataagtccagaaagaatgaagaggctgagccaaagtaaaaacaacgcccagttgtggatgtgtctagtgatgggagtgaagtctgatgctgtaaagaacaatgttgcataggaacctggaatgttaggtctatgaatcaaggtaaattgaagtggtcaaacaggagatggcaagagtgaacatgaacattttaggaatcagtgaactaaaatggattgaaatgggcaaatttaattcagatgaccattacagctacaactgtgggcaagaatcccacagaagaaatggggtagccttcatagtcaacagaagagtctgaaatgcagtacttgggtgcagtctcaaaaacaacagaatgatctctgtttatttccaaggcaagtcattcaacataacagtagccccaaccactaatgccaagaagctgaagttgaatggttctatgaagacctacaggtgtccggtggctcagacggtaaagcgtctgcctacaacacgagagacctgggttcaatccctgggttgggaagatctcctggagaaggaaacagtgacccactccagtattcttgcctggaaaatcccatggacggaggaacctcgtaggctatagtccatggggtcgcaaagagtcggacacagcaagaccttctaaaactaacacccaaaaaagatgtcctttgcatcactggagactagaatgcaaaagtagggagtcaagagatacctggagtaacaggcaaatttggcctgggagtacaaaatgaagcagggcaaaggataacagagttttgccaagagaacacactggtcatggcaaacactctcttctaacaacaggagaagactctacacatggacatcaccaggtggtcaataccaaaatcagattgattatattctttgcagctgaatatggagaagctctactgctgttgctgctgctaagttgcgccagccgtgtctgactctctgcgaccccatagacggcagcccaccaggctcctccgtccctgggattctccaggcaagagtactggagtgggctgccattgccttcttcagaagctctgttcagtcagtgaaaacaagacagggagctgactgtggctcagttcatgaactccatattgcaaaacccagagttaaattgaagagtgtaggaaaaaccactagaccattcatgtaagacctaaatcaaatcccttatgattatgcagtaaaaatgacaaattcaagggattagatctgatagatgagtgcctaaagaactatagacgaagatttttaacagcgatcaaaaccatccccaagaaaaagaaatgcaaaaaggcaaaattgtagtctgaggagggcttttaaagagccgtgaaaagaagagaagctaaagacaaaggagaaaagaaaagatatatccatctgaatgcagagttctaaagaatggcaaggagagataagaaagccttcctcagtgatcaacgccaagtaatagaggaaaacaatagaaaagaatggcaaggagagataagaaagccttcctcagtgatcaacgccaagtaatagaagaaaacaatagaatcggaaagactagagatctctccaagaaaattaaaatagctagggaacatttcatgcaaagatgggcacaataaaggatagaaatgatatggacctcacagaaacagaagataagaagaggtgacaagaatgcacagaagaactgtacaaaaaagatcttaatgactcagataaccatcatggtgtgatcactcaccgagagccagacatcctggagtgaaaatcaagtggaccttaggaagcatcactacaaacagagtgagtggaggtgatgggactccagttgagctatttcagattctaaaaaatgatgctgtgaaagtgctgcactcagtatgccagcaaattgggaaaattcagaaagccacccagaaaaggtcagttttcattccagttccaaagaagggcaatgccaaagaatgttctaactaccacacagctgcactcatctcacacgctagcaaagtaatgctcaaacttctccaagccaggcttcaacagtatgtgaaccaagaacttccagatgttcaagctggatttagaaaaggcagaggaaccagagatcaaattgccaacatctactgaatcacagaaaaagcaagagaattccagtaaaatatgtacttttgcttcattgactttgctaaagcctttgagtatgtggatcacatcaaactgtggaaaattcctaaagagatgagaataccagacctccttacctgcctcctgagaaatctgtatgcaggtcaagaagcaacagttagaaccggacatggaacagagactggttcaaaattgagaaaggagtacgtcaaggctgtatattgtcaccctgctcatttaacttctatgcagagtacatcatgcaaaatgccacactggatgaagcacaagctggaattaagattgccgggagaaacagcaatgacctcacatatgtagatgccaccacccttatggcagaaagcgaagaggaactaaggagtctcttgatgagggtgaaagaggagagtgaaaaagctggcttaaagctcaacattcaagaactaaggtcatggcattcagtcccgtcacttcatggaaaatagatggggaaaaatggaaacagtgacagactttattttggggggctgatttttggggcctcaaaatcacagcagatggtgactacagccatgaaattaaaagattcttgctccttgaaagcaaagctatgacaaacctagatagcatattaaatagcagagacattactttgctgacaaaggtccgtctagttaaggctatggtttctccagtagtcatgtgtgaatgtgagagttggaccataaagaaaggtgattgccaaagaattgatgcttttgaactgtgttgttggaaaagactcttgagaatcccttggactgcaaggagatccaaccagcccatcctaaaagagaccagtcctgaatattcattggaaggactgatggtgaagctgaagctccggtacgttggccccctgatgcgaagagcggactcactggaaaggaccctgatgctgggaaggattgaaggcaggcaaggtgggcaacagagaaagaggtgattggatgttattaccagttcaatgacatgagtttgagtgagctctgggagttgctgacggacagggaggcttggcgtgctgcggtccatggggtcgcaaagcgctggacacgacggagcgactgcactgaactgaaggagtgacttcccttgtgatccaggaatcaggactccatgctcccgccccaggggcgtgggcttgatccctgactgaggagtgagctcccacacgcagcaaggcattaccaaagagggaaaaaagaattaaaagtataaggaaggtgatgtggtacaatctaatacctgggttagatagattaccagacagtgtgcaagatggatttaaagcaggagggaaggagtaattcggtccccaaatcaggttgttccaggcagagaagcagcatatacagaagtcccctgagtggttctgaggagctaaaattggtgaactgggtgttcttactggaggatgtgttgctttaggcgtgggaaagcatgaacaagtgtgtgagcagatgattagcaccgatgtgggcctgctggatttgaaacctttgggctgtctaacattcttcaccaacatttgagcctatggcaggtggcctagagttctagatatgaatacatattagaaagtctttgctaaaagaattttgactgtagcactgtgaatgactaagctcactcggggaactgtatataagtaggggttcagctgacaccagaaccatgtggaaaagcagcttttgcgaaatagagcgaacaacgtagctcgagaaggagcctgaggatgagcaacaggcggccattgagagaggagctcagccgcagagaggcagagcttggggactgaacgtcagaagaaaggccaggcgtagaacattcgggcatatcatcaggactgatgcgggggctgaagctccaatgctgtgggcgcctgatgccaagaactgactcactggaaaagaccctgatgctcggaaagactgaaggcgggaggagaaggggacgccagaggctgagatgggtggatggcatcactgacttgatggatatgagtttgagtaaactccgggagttggtgatggacagggaggcctggcgtgctgcagtccatgggttgcagagagtcagacagactgcgcaactgaactgacttgactgatcatcagacttgagggggtagctaaagttgacatgaaagcattacacagagttagagatctgtctttcttagtacagggtatggggtggcaggaagggaagttgtactgccagtgtagattttttttaagtcagctacacttttgatctggagaatttaaaaatctttctacctagctgttttttttttttttttttaatctatttttaactggagggtacctaccctacagtggtgtgctggtctctgccacacaaaagcgtatacatgccccctgcatcgtgactctcctgccctcacctgtcaccccttcccatcctctaggttgtcacagagcactgtctgcccagctgttgaaattgatcaatggacattcagagaaagccttctattttagtattagtgtactttatttcttgactttttgtttgtttcttttaagagctcaaagtaagacagttttcaattactgttttgtttttttttcatgtttaattcttgtgccacaagaagcacgtttccctcagagtattcatttaggtgctgtgactgctgaggcacgctggctacacacagactgtatagaagacctctagccaaaactgtccttaaagactgtcgctgaagaaactggtcaagggaacacaactagaacagattttagaagctttttcctggcctttactttatgagcacaggcatttatgtggcaatcagtttgttattccacatttgaagcgtttgtcctgagttggttaaagtagttgctggttcttctttaagcttccattgataaatactttaaagagtcatggccttatatttgttaatttcatcctgaaataatacctgttccatttttcctgtgtttaggggaaagaaaccctgatgcctcctatcccctttgctagaccacaggatttggggccaacaattgccattgttactaaagtcaaccagatccaggatcagctactgaagaagcatgacattgagctttacatgcacctgaacagactagaaattgcgccacagatctatgggttgtaagtattcagtttaaattgcggcagcaccacattctgactcacagtggtttctgtatgctctggactcgtggaagcaggagtgagcaccgtcccggcggtggttctttcattttgcctttgtgttctgagagccagtcactgtgctcactgctttcatacgccgtctttcatccaatattaccctttcttacaaagggagaagctgagacgtacagtaaagctgttagtcactcagtcgtggccaacactttgcaaccccatggactatagcccaccaggctctcctgtccatggaattcttgaggcaagaatactgaagtgggttgccattccctcctacaagggatcttcccatcccagggatcgaacctgggtctcctgcattgcaggcagattctttactatctgagccaccagggaagcctgaggtttacaataaccttacacatactgaacagtgaaatcataattcagtccagatggaactggatccataatctgcaaagcccagtgcaaaataaaaataaatggctctttaaaaaaatgagtgggaatctcaagatggcaacagcagatcattaaaccaagccttctgagaagtgcagagtcacacagattctatacatgtgaagcagcccagtacccagacagtcctgtaatatattcacgttcttgccgctttataatgtgcttatctgctctaccctttggagtgcatttctaaaagtaagatgaatgtctctcacagtaaaaataatatattaaccttctttagctggatgatttctgtaacatactgtagcaggagaatatggagccagtcacccttaggtgtatatgagcgtgtgtgtgtgtgtgtgtgtgtgcattcaataacttataatgtgagtgtgcaaatcagcaactttaataaatatgaattagttgtgtagtgctacagacagcgaaaggatcttttagattcagatgatacggcattcatatctaatgttgggcgttcccttggtagatgtttcttgcagatcacatctttcaactagatcgaaaatggaaaattgagaaggttttctgagatacacataatagatttgcagtgaatatgagttcattatttcaattaggaagaacctcaagtcataggttttgaaccagagcagaagccatttatttagagcaaaggaaagcatgtcagtgagcgttttcttcatgtccgtgtggcacagtctgacactagtgactgctgcttagctgctctcctcctgaagccctgagctctgactgacaccctccacactcctgtttcagtgatactcgtttgcatttttgtgacttaagcttgacttcatcactgagagtcgctccgtcattcccagtgggagggagaaagctgtgggaatcatgggtcttgggcagcactgtaaatactgtcacactggcatttactccactttcaagtctggctaacatatgtgtgattatagaataaaactctgtggcaaactaccaggtggccaggtcaggaggcagattctgtgttctttccgctttgtgctgctctagtgttcctgcctgggaaaccccacggacagagcagcctggagggctacagtccacgggctcacaaaagactcagacacgaggtagcagcgaaactacagcaatgcactcaaacagctggtttattcaaacacagaaaatggtttgatagcttcaaaaactgttttctggtctagaaatttgtcttaaatattggagaaagaaactaatgccagacacatttctcacgtcttggaaatgctctcttgtttgctacctctttggccgagctggtgccttacattgtggtggtcgtggcatggacttgggtacggtgatttttagccagtgtgttcaggtttccttatcagacattagttcccatctgctttctcttcataatgacccatagaacttctttcacatccaaccagcaccttcccaataaaattctgtgatccctgacgtaattactcttaatcttttccacttcattttttagcagtactaacaaaatcagggcttgcagtaacagtagctgactcagttatccctttatttttgtatagatgtattattttaaaatacacaatttttcatccttgaagaaatcactcattctcttaattgttctgtatgacattctgtagtgcaaggattttacttacttatatcacttattaaatttgatttcataatttcttttggtgaggcaatgtggttgagttgccctatgcctttatgctaccctaagctgtgccactcatctgtgtatttcctactgaagactgtcagaacgggcacaaaggatactatgagtgtgatgtgaaatggcagttagaagcagaggcttcgaaacgatgcagacttgtttaaccactctgagctttggtttcttcatctgtgaaatggaaatgaaaaatagtggtacgtacttcatggagtgcctatgaaagttaaatcataatatataaaaatcatagtgttcagtaggggataaacattgagtatatggtgagcactgctttcgttttcattatctgccattgtcgttgcagacttaagatatcatggccctgtcagcatgacgtaccctgtgatttgtgagctcttctagctctgactttggctttctgtgttttcttcaataaagcatccaagcttctacttaagtggaatcataatagctatcctttgtaggggtgcttctcaagaaatagtacagaattgaagagtaaacttttagaaacattatagcagtttgacagaataattttatgtccttgaacctaataaatgttgtaggttttatttcatggaaataaattaaaattattagttttgttttagatcatacaagtaatattaatctaaataactgctgatgctcctatatgttgctcttgggagaaagttgtttacaaggtggagaaaaggttatttagcaaaatgaaactatatcctgtattgagtccaggtttctaattttagtcagtcttagcagtggcatcccactccagtactcttgcctggaaaatcccatggacagaggagcctcgtaggctgtggtccatggggtcgtgaagagttggacacgactgagcgacttccatttcacttttcactttcatgcgttggagaaggaaatggcaaccccctccagcgttcttgcctggagaatcccagggacgggagagcctggtgggctgccgtctgtggggtcgcacagagttggacacaactaaagtgacttagcagcagcagcagcagttgcatggtacattaaaatctaattaaatctgctttctgatatggttgtggttatctttaagacaaagatttgggacttccctggggtcctgtagctaagactccacgctcccaattcaggggcctgggttcaatccctggtcagggcactggatcccacatgccacaactaagagaccaggcacagccaaataattaaataatttttttttaaagaaatgtaaaaggttttataattgccccattctggtgttcttgcctggagaatcccagggtcagcagagcctggtgggctgccatctgtggggtcgcagagtcagactcgactgaatcgacttagctgcagcggcagcattctgatatttgtgtgagaatatatgtggaagtctcctgatgtggtaaatatgccatctataaatgcacttactgctttttgttaataaatgtacttaacaaaattagaattaataattagtgtatccacatgaaatgtggaacttgttctagttttgtgaaaaatggcgttggtgatttgatagggatcacattgaatcggtcgattgcatctgtcagtacagtcaggaggagtgtctgtccatctgtctatgccacctctgacccctttcttcagtgtcttacagttttctccgtgcagctcctttgtccccttaggtaggcctattcctgtttttgttgtaatggttagtggggttgattctttaatttctctttctgggttttcattgttagtgtataggagtgcaagtgatttctgtgtattgattttgtattctgcgactttgttaaattcactgattaggtctgggaattttctgacaatataagtggtgctgggaaaactggacagctacatgtgaaagaatgaaattcgaacactgcctaacactgtacacaaagataaactcaaaacggattaaagacctaaatgtaagaccagaaactatgaaacacttagaggaaaacacaggcagaacccttgatgacgtaaatcaaagcaagatcctctacgacccacctcgtagagtaatagaaataaaaacaaaaataaacagataggacctaattaaactgaaaagattttatacaacagaggaaactataaataaggtgaaaagacaaccctcagcatgggagaaaataatagcaaatgaaacaactgacaggggattaatttccaaaatatacaagcggttcatacaactcaataccagaaaaacaaataacccaatcaaaaagtgggaaaaagacataaacagacatttctccaaagaagacatacagatggctaccaaacacattgaaaatgtgctcaacattgctcattattagggaaatgcaaatcaaaactacagtgagatatcacttcacactggtcagaatggccgtcatcaaaaagtctgcagtaaatgctgggcagggtgtgggggaaaagggaaggaaccctcctccactgttggtgggaatgtaaattgatggagtcaccatggaaggcggtatggagattccttaaaaatctaggaataaaaccaccatatgacccagcaatcccactcctagacgtataccctgaggaaatcagaattgaaaaagacacatgtaccccagtgtccactgcagccctatttacagtagctaggacatggaagcagctggctgtccatcgacagatgaatggataaagaagctgcagtccatgtataaaggaaatattactcaaccatataaaggaacacatgtgagtctgttctaatgagggaggtgaaccgagagcctgttctagagtgacgtaagtcagaaggagaaaagcaaatgtcgtatactaatgcatatatatggagtctagatagagggtactgatggaatcatttgcagggcagcagagagacacagatgatatccagaacagacttaggacacagcgggggaggggaggaaggagagagtgggatgtatgaaggctgtaatgcggagacttacattaccacgtgtaaaatagatagccagtgggaatctactgtacgactcagggagctcaaaccagggctcagtaacaacctagagggaggggatggggagggaggttcaagagggaggggacacatgagtacacacggcggattcatattgatgtttggtggaaaccaacacaattctgtaaagcagttaccctcaattaaaaaataaatttaaaatttacaaaacagtgtaaaaatgttaattgcaaacattggctaaagtcattccaaattagcttatcttaattttaaataaattgatgaaatttgtcatgaaatacaggaataagatcctaggaaagcttgaatgttatataataacttgcttattaatgctattattttgtatatttaagtgtattatctcctgaataactgtaactggattttctgtcaggaaatgttaaatcaacttactacttaggttaaacagtgttaatttctaattaaatatttaatacatcctaaatggacataagtctgagtgaactccaggagttggtgatagcgaggcctggcgtgctgcagttcatggggtcgcaaagagtcggacatgactgagctactgaactgaactgaactgaagtgatattatagaataatatttcctaaaagtagtttacactatcttccactaattttgtgaaaggttactccttttataccaaaaatgaaatttctctttaaaaattcaggatatttattatcttgacttgtctcgtttgctaattattagactttttaaaattcaagttctaaggggcctatcaatgcatgctgactaatttccaaagtgaaacactgactacatgacttcaaggtgacttctaacagttgctgttcagtgttttcatatgagaataagaatgtcctctgatttcatcacttaggagttatttttgtgaaaaaacctctaaaatattactttcaccatttcatccctgagtatgtgttattttaattccagaagaacctaatcatagcagataaaaatacaagtattcggtgctgttttcttaatactcaatactattttgaaaagagattaaaaactgaagtttaaaaataacagtttttgctaggccagagtacagtttttgctaggccagagtaactgtattttattagcacttttaaatatattgaatctgtatattttcgactacattttattctttgatataaatagaatacataataagcatctgtgggatatgcaattaatgtcacttttgaggaaagatcctcataacacacttgggctttggcattcttaaattatgaggactttacagcactcatgggataaattccatatctcccaaatgtttattatacatctttcatttcccttatttcctattttctggattagcagttgttttgctgtgttgatgtctagtaatttagtagaggaggttcttgattattgataaataatctgctaaatttgggtattgtttccaaatatttatatcacagtatatttgttctaacacatatcaatgtgattgtgtataactaccaagtttttcgagctgatatttgaagtataatcatatggtcaaaaatacaactgtcatcaaagtcagtataattacccaccttaaaaattctctctcaacaggttaagaaatggcttcctgttctaaacacagtcagtgattgaaatgttcttatctttttaatgagctttacattatgtattaaatataaaatatatgtttgataccttgttatgcactgggcaatccccccaagttaatccttctgaaaaagctgggttttcctacttctatatgaagagttataattaagaattattgggaaagataattatttgaaataatgattaataattgttgatattcattgtttcctaaggaccagacattgtccctagtggctgtcatcagctacttattctcacaacacattggtacacgtattgtgaccatctccattttgtagatgaggaacttgaaagtataaaggcttattttgtttagataaactagctaccaaaaagttgagccaggctttgcactcttgagcctgcattcatactcttgtttgactaggactatgaggatgtaggagaatttttaaggtgggtaattatactggagaatcccatggactagaggagcctggtaggctacagtccacggggtcgcaaagagtagtacacgactgagcgactttacttacttacttacttaattatactgacattgatgacagttatatttttgaccatatgattatacttcaaatatcacctcaaaaaacttggtagttatacacaatcacactgatatgtgttagaacaaatatactgtgatataaatatttggaaagaataccaaaatttagcagattatttatcaataatcaagaacctcctctactaaactacgtgtaagacacatagacgtactatgtatcagactagaccatgagtcaaatgcagggcaagcagataagcagcaaagaccagacaaggtcaaggcctagaatcagaggagccttgttactagtgatcagaaaccagcctactccaaaatttcattccactaaaattcagtgcaaaaataaaaaaagttttgcagtgtagttgatgtgtttgagagaggcaagactggaaacatggatactggtaaggatggctttgcccttgtctgggtaagagttgataatagcagtggaggagaggtggtctgaagaaatgtttcactgatagaatctatggtttggtaataacccagactgatagtgcttatttgagaaaacggaggacgctgtggaatggagttactatagttgcgcagcatccagtgcgcctccctgctggatcaccttttcgtttcttctgaagcagtctgcccagtctatgtgttactaaacccgaccgcctcagctgcttgcttcctcgccaccagcctgaagctcaccttgtcttctgccctattatcgatacctctgttcactctctgtataccctggagttaacagtttccctcttctttgtgaccaggagccattaggtattatatcttcaatgtttctaacctagttctctttgctagtttcttaagaaaaaaatgaatcagcaaaacaaaagcctttctttgagccgcctcctccagtaggcctacttaacgcctctttttgttttctaaacctccagaaataaatatttcagtttcaatttgccagtgattcagtgtcactgtggagtaagtgtaaatggttggtctaaatccaccagttataagacagtttggaagattttaaacatgagccaactacattctgtctacaagaagctcacttcggatatggtgtttgtagattagaaggttggaaaaggtaaaacacagaaacattaaaagaaatggggaaagcgataataatgtcaaataaagtacagagaacaaaaaattaccacagacaaaacggatattacataatggtaaaagggtcagtccagcaaatggatttagcagtccttaatgtgtgtgtattgaaacaacagagttgcaaaatacatgaaccaaaagagagctgaaagaagaaagacaaatccatatttatagctggagactattactaactgatagtaaactagacaaaaaaaatatagaactcaacaatggtagtttataccttcagttcagttcagttcagtcgctcagttgtgtccgactctttgcgaccccaagaagactaattcaaagtaagcagaggaaggaataaaggtaaggatggaaaccaatataattaagaacactacaaagataatagaataacaagaaacagaagagtaagaaaaatgaaacaaaaagctatttctttgaaaagattaataaaatcaacaggcttgaacaaaagagaggcaggagagaaggtgggcatgcttacaggagagcacaacaagaccctcgtggtgatggagcgtgtggtgttaggactgtgaactgctgcgtatcctgggggtgatcgggtgccatgtttctgcaggacgccacccttggggaaactgagttcacagactctctatgcggtttcttccaacttcatgtgaatatacaattatctcagaataagttttgttaaaataatgtcaattcagatagctcacgtctttagcccaaccaaataaattgggtttatttattttcttagtattgagtttaaagctttctatatattccatagagaggtctgttgtcatatttgttattcacaaatagtatcttcctgccagtggatcgtgttttcatttcttacaagcatctttcatagcgcaaacatttttcctttctggtgaaattcaaattatctgttgttcccataccaagtttgttttggttgtcttatctaagaattctgtgtttaacccaaatcataaacatcttattttcttctaattgttttgtgcagtatgtttaggcctgtgatccattttgagtaaatttttgtataaagtgagaggtcgtgattaattaatcaattatttttggcagatagatccaggtcttctagtatcattgtggaaagactatccttttcccattgagctgcctttgcatcttgtcagaaaccatttggtttgatttgtgggtttattgccgatctgagtttttacttctgttgttctgttaattactgaaagaggagtgttggtccggctgtaactgtgaatttctctgtttctgaaaagccgcttcagaatgacagacatctaagattgagaattagccatccagtattcttaggtgcctgctaagttgcttcagttgagtccgactctttgtgaccccatggactatagcttggcaggctcctcagttcatgggattctccaggcaagaatagtgaagtgtaagatactccagccaagaccctcttctgcagtgggtcttcgtgactcagggatcgaacccacgtctcattatgtcacctgcattgcaggcacattctttaccattagcgccacctgggaagccttaaaggttttcgttttgttttgtttggaggcactgtgtagcaggtgggatcttagttccctgaccagggatcgaacctgtggcctctgcagtggaagctcagtattaatcactgggccaccagagaagttcccagtattcttatcccaatacaaatggcacaattttcttttaatttgtggcaggtaactcagtcttgtttctttcctggtactttttgacacacagagaacgtaattccagttatgtatatggtatgtatagacatgttaataaaactgttaaatacagctggcttacgagctttgaggaactagtgaattccaatatgatcttggagtgctgtatctaaaaggactgtttgctatttggaaatacagtgtttaacacagaccaggacttttttttttttttttcctcttttctaaaattcttcccataggttgatttttttccaattaaatgactttttccactagtgttttggaccctaataaatacatgggattagtggaaacaaccaaaaagcaaatgatgtccttttcatttgatgtatttgaatagttttagatgattccaaagtattaagcttctaacaagtatttacaatgaatgttaaaatgctttcaatacatatataagaagtttgtattgtaaactttttatctctgtaattaagaccatcctttaaatttatctgtttgtcaaagcaattcatttattaaagaccaatatgtaaatattttctaaagtatatgattaaattcacagtgttgaaatatatgtttctgattaagaattgaggtgattgagacacaagacatgttgtgcacctgagaaatactgatgtgccagaggctgcaggccaggatggttcataacagaacatcacccccaccaacacccttctggttgttagggatgagagtcatccttgtttcttgagttcttcctcttaaacggtataacactttgtcatccccagtgttaaccttacccagcagacctggtcaacctcagtttacatcaacgttctctggaggagcttgatagaacagttgactacacagttgctgtgatgtctttacctggacataagtgtgtgggaaaacaaatatcaccccacacctcagcatgcataaaatgccatctaatattctccaggaagacagggtcagcgtcagtttcagtcttaatggaacactgggatgtctttttaagccgtctggtttaacagcacagtgacacgactgtaagtccagtatcacctttgagtcagtgagccagtagaagacgtttaggttggaagggacataactttggtcctcaaattggaactgttatcttctaaggcatgaaggcgaaattttcaggacttcctgggaagtaacagttaagtggaggtgaagtacttgccatattaattagcctctcatgttccgtctgtcccatctctcatccttggcgcctttatttcatgggtctctgattgttttcctcttctctaactccttccataaccaagtaagccagaggcaaattgaatatctgcagctaattgccctaataagctctttcctagtgctgtatggtaattcatgtatgacatcatactccattattaagtatagcctgtaattaacctaatttgtatcacttacatcagtgattacagtgtgtgcctttaataggtgtctgaccagccttaagcttctaccttatttttcggcctttagggtcttggcctaagatacgtaaaatcttttatgggaactactagtacttggaacagacgcctgtaaatgtcagcttttccagagaagtgtctcttgaccagcttttaagacatctgagatcatccaatacacatattgtgtggatattctattatctttccaacttctataaaattgttttaaggatagcattgtaccattaaataaactttctctgacccacaatgtcaaggtagaatcccgccttcctacctttagttcttccctgacctaagtattaggaaaatgatgagcttgctttaatgatgacaacctcttccaggctcataatttcataagatgctgtttgacaaacactggtgattcaaccaggaaaactcatcattttttacattcagtttaaaagggtggaaagtaagaactcttctaccacaaactctatgaaacacttttttttcactcatagggtggcactaacggtaaagacggagaaggcaatggcaccccactccagtcctcttgcctggaaaatcccatggacagaggagcctggaaggctgccgtccatggggtcgctgagggttggaaacgactgagtgacttcacttccacttttcactttcatgcattggagaaggaaatggcaacccactccagtgttcttgcctggagaatcccagggacgggggagcctggtaggctgccgtctgtggggtcgcacagagtcggacacgactggagcgactcagcagcagcagcagcagcagtgaagaaccctcctgccagtgcaggaagcgtgagagctccaagctcagtccctgcgtcaagacgacccccgaggagggcacagcagcccgctccagtgctcttgcctggagaaccccatggacagaggagcctggcgggccacagtccacggggtcgcccagaggcggacacgcctgagcgactgggcacagcacgacagagatacatgggttaagcgtgcgtggggcatattgctttttacttatttttgcttttggctacttttaattcttcatcatagctttctttacccctcaattttcttagtcttaattttggagttttaaatactggatttgtatcagaatttaagtacaggaaaagaaatactgtttacaattcagtttagcttctatatatacattttgtttctggaatctcctttcactaaaatttgcttccctaatgaaaataatgttcttgtttccattttacttcagtcgttagtagtttgatatttctgtataatttcatgtaatgattttagcaaacctgccacctccaaaaggtccttattatggcttgaactataaattgtatgtggagttaaaaaaaaaaagtccagactttgaaaaaaaatttaaatagtcttattaagattaaatgttatgctgcatggagtttgtgggggaaaatatggtataatttttaaaggatttttattttgaatcagtaatcattaaatcgacataaaccctgattaaaaggcaacagagacaatgtcaagatgaagagaactggggaggaaaagctgagtcatggtctgaggaagcccacctgtgccgagcaggttcagcttctactaaagaaagggtctgccttaattaagtcagtgggatttaaacagtggtgtacgttacgttcagtcatgtctgactctttgtgaccccatggactgtagcccgccaggctcctctgtccatggggttctccaggcaagaatactggagtgggttgccatttcctccagcggaatctttctgacccagggatttttctggcgttatcttgtgtctcctgcgttggcaagcagatcctgtcctgctgatgccccctggggagctgaagtgtgagcagtggccactgtggatgctctccaaaggagctagtgttcccaggtgtgacggtgcgcctctccagcctagggcgggaggggtcagcgctgcacgtgtgtcttagtgggaggcgtcttaccatgtcgatggctgctgtgaactgtacactcagttcatttgtatcaccaacttataattacaagggttttgttttatttgaagtaaatattgagagaaaaattacatttatcttttgtttatatcctcttacagttgccaaacccaataacaggttctgggttgcactaaatgtttgcgaaagttgagttaaagtcacattaaaagtacttccttttataaggttgtcatgtggcattgctgtttgcagagcacttaaaacagtgtctggcacatggaaaacacttcctaagtgtcattaaatttaaaaataatgataaatcctagcaaggatcataaaattctagttaagactgcatacctctaataataaaaatgatgaataatattactccttcaaattgaaaattaatgggaaatggttctttccagagtcatgagccccccaccccagatgcctttgctctggtccagcctgtcggggggctgtcttttctgcagcctgatggcctcccgacagggggagggcccgcctcttgctgtttgtgatgaaagtgcagatcagggcagactggttcccaaggtgactttcttcttatctttgagtattcactcccactcttcttcctgggaaaatgcgatttcaagacagtagtcagtgtgaggtgagagggattggttttctaatcatcctcttccacagattgtgttgctggcgtggggggtgggcagctcctttctgcctgcccagggtccatctggaggcttgctcctggccgcccacccatgcttcctgctccgcggcctcttgctcttcgcctcccctccctgtacccgcttcctgcctgcccctcatggcacccccacctctgagccgtgccttctgctggtgttaggacataaaggccaaggagaagggggaaaggagacaaattaaacaaaagaggaagctttttaatgtttggcagccatgccttcagcccctttctagatcttgcgcagcctcactgtttctttttgaccagggacactgagacattgccgccccccaccccaccccccttttaaaccattaaggatctcttgagaaacaaggtttgactgatttcctggtactgtgtctgcagccacgggtttaacgtttgcctcccaagccctgcgttctttattaagcatctactgatacccaatattgtgctttattttgggtatttggaggattactaattagaacagggatcaacttctctagaaggctagatgaaaaccagtagaaaaaatttgtaggcgtgggcttatttttaatcagcagtgggaaaatcttatatcaagaattatttgcaaaatagctggtttaggatcagtgagtgccttcatcctgacgtctcagcagaggctcagcagtcctcagccaatggctgatggatggggtgccttctgagtgagagagtgggcaaaagggaggataaggtccaacactaaggttgcacgtctttgaagcaacacagatgactgggttcactcccatgaaaaacaaccacatcaattgttttagccagtaattatcagtttttttaaaatcagcatacctgttttttatattgaaatgaccatggcccttctgaagcatggtttctttaacaagttgacacttactttaataaaacattatcactcaaaatatttctagaagcccgtttgtaattgctgttattaccagtgtaggagcgatgttggagacgctgttcatggccgtgtaaccaagtcttcagaaaaaggttttgcctactgttgcttctcaggttgtagataaaccgcatttggctctaattagaagtgttagttactttcatgaattcagcccgtccttaaaacatgctccttggtttctctgggaggcattcaaacaatctgccttggctctgactgaatcttttatatatgtaaatttcggtgtgtttgttttaaaaagaatccgtttcctctctttctagtgacgcagactatgtattttattatgaatgtgtggaaaagtgatgttcagtacctacagcaaagccaagaccacacactgtactagttgacgatggcgccttcttctgaagtattactttgacgtaaaaccggattgcctgaaagagaacccagtctgatggctggcctttcctgtgtgagtgagtgtgtcagtcgctcagtcgtgtctgactagcccccaggctcctctgtccatgggatttcccaggaggggattgccatgctctcctccagggggatctcctcaacccaggggtcaaacccaaatctcccacattgcagccggattcttcaccatctgagccaccagggaaccccgagaatgggtagcctatcccttctccagaatgggtagcctatcccttcccaactcaggcatcgaaccaggctctcctgcattacagcggactctaccagctgagataccagggaagcccacgactcacttgagttttctgagttttgttttctacttgagccattttaattgaccacagccacctgagggacgtgcccctcttactgccaactaggaacgtatgggagccttgagggtgccgggaacagaacagtgcgtttgaaggcttgtggcagcagagagcatcggggcctggctcccggagcctccatgcaaacagcggagcctataaactgccggccttctgctgaacgtaagctggaagttagagggtctgggagacagtttggtggagttctataaaaaccttggcttctacgacagcaactaaagggaaatggtgaaccgagtgaaatgatcctgtcccttggattgtgaaccacagtccagttggccagatttggattttcagctatagcccagctggtgaacagttcaaaactatttttgatcatgtgatcccattgtggccaattgggtggtttggcagacagcggcatagtaaatatctattcacacaaattgtacgcatactgcatttgtccatgtgcagcctctgcttgtctgtattgctgataacatctccacatagatgggtgggtaaattgtgtgtgtgggtccatacctggaaatttatgcacagtaattatgcactttgattccttctaggaaacagaatggtaggaataatctagttaaatcagtttctatggggatttttttttactcctttttttcatgtttcctccagttgtaaaaattacagtgattacacatcataaagcctatctgtaataaaacgcatcagctggccaaggttttcatcgctcactcaataatccattaatacagcaacgctgcccaggcatctttataataccaactcggaggtaattttaatcagctagaccagctggtatttaacagcagctgctggagatgccacaaatatactcaatagctgacatctttatttgcagtttttcaaggggagaagagattctcctgtggttacttgtattaagcatttaaaagaaggtgtaaagtatacaggggtttatgcctaaatgagaaggggaagggattaacaatgaaacaaaggcgataaattctatcaggagcaaaggtttgtgaatgaagagactgctcaaataaataagtatacgttgctttgggcttcggatatttttctgagttgcatttccaaccgtgggtatcactaggagtcaagtgcagtctgcacgcagcatcctgaccctctttgcactagagctgcagtgtcttcctaggaaaagctgtgaaaaggatccgagtgtatgagagagagcgctgctcgtgtgcgtgggttctgtctcagcccctgcttgctgagtcctttgttgttgttttatggagatgttttattaatgttcagttttgatactttaaatgaaaaggatcatcaccagtatgtcccgtctagcagtaaacgtgaaatgccgtttcacatggtggtatgtgagtgtggttgggggaacaggcttcagctccatgaagtcaacagtcgcaaacccattataaataaaaatttaattacacttgtgggagcttggcttacagagctcagaaatccataatggagcttgctggtaataaaggcctgatctgtttgttaaactccactgttccatccctttctttgccttcttttgtaaagtgcttggacatctccgtggagtaagacctggtaaatggagctgactctcttgagttacaaaatgtatatcctttacttctttggctgtgtatctcccttttagtttaataaccaaaagaaaataattaggaaaataggaaaaggcaaaggtattgttagaaagataaaagtctttcaaaatagttacttttaatccacatttataaatgagggttttacatacagataactttgtattcagatgtgttggtgatacaaatgtctgatacgtatgtggacagaagctaagtggattccattttcatggagaatttcatgtatcattttttctaagactgatttcaaaatgcaatataaaagaagtggatggagttgtggtccttgtacatttggcatagaaatagttttatcatttctgactcttatagagcagtcagaccttttttatggtaatagttcttgctgggaaaggatgcattacaaactcctaaaaaagtaaaatgtattaaatgtttaatgtacttctatactgaattatcagaggttaacaaaatttgtcgtaatacggagtcttttacagttaacttcatttatgtgccactaaattgtctttttccaaagccaaatagtgatgtgtctgtgttggactatgattgaatactgaaaattaaaatcgagtgacagaatggattactgagatagcaatttgagttttaaaattacttagcaagcgttttttcctgttatttgtagtgaaaacagtctgtttaagtttgcttagtgtgtttgacaacagacagtttgatatattgctgggcacagcggtaggttggacttgagtggtattagctctccgtgttttgattaatggtaattgtttcgatgaaaaggcatgttttacgtacaactcatagttctggaaagcagaagtcaacttgcaagatccgtaattactgttccgagttagcagataaagagggcaaggagaacctgccagaggagcacagtaggatttttttttgctttttgctttgtattgtagttagagactgttccttatgtcagaatataaatcttcggttatttatcttttgttcagtatttgaagttgatttatgacacatttctgtatcccataatttagtttgaatcccatactgaggtgaaatttcacctgtctctagagtcgactataaaaggaactcaaagccagctacctagtgtagtgtagattacagttttttcctgatttttctctagtcttgtcctcttgttttaaaagaacgcaatttagaaaacaataaaaaggtttattttaacacctcagagatttctgttgctgtgtaaaacattttacatttcattaatgtacacaaacacaagggaaaatgatcatttttacttggggaaaataaagcatgctttgaaggaccaattgtcgtcagcctgaaagctgtcagaataccgccctcgtaatgtctttctttctcacactgggtctgtacacgtacgtgaagtagacgtgagtatacaaggttattgatagatagaaattaactttaaatgagtgaccttcccttttgcaagagcaaaggaaaacgacttttctgtaaagattcgagaagggtctgggagaaaatgccctcacatgcttcactgtccgtgttttaagagggtgagaaatggaagttctgcaggtggaggaggcactaggggagacctcctgcatcacttctctctctcgcttctgctagaagagaactgggcggtagagtaagtgtgaggaggatgatctgaaagtggcaggaagggcagccgtgtttgtgaagctgatgttgaggaccagcatttgcacagcctgcccctgcttgctactgaagcatagaaatgttgagtctgttggataatttcctaaatgtttatccaagaagcttagtgtgatattttaaaaatattagtcctccctgagagtagcagatgccctcctgtgcgtcttctgtataatccatgttctttagtatgtttgagggaaagcggggtgggaggtggaatctgcagtgcagaaacttgtgctgctatttctgtctaaaacggaatcaccgatcctgctctatagtttcctgaactgaaatggattgaaatgctatttgtcaggttgggtattccaaccagaattaaaattaataagtggttgtctcatgcacacctaagcctttgacataaaaaggggatataatttttaaaaaaattccctcatagtgaatagccatgtgtcattgtggcatcttttattgaaaggaactttatttaagtagcataaacttgttggatgggcttcaattaaatgatgatttgttaatgcaaatgcgtggtgaatgactggtggtacatctgtctcttcatccacaggccattactgtgcagcattagcacatgattgtaaaaaacgagaaatcattatacgcaggtagtacatattcagtcagttctgaccttatgtctctggcgaaataaaaaaggtatataatgtaaatgatacttaatctgaataacaaaaacacagcactttgaatctctctgactcaatctgttaggtgatgtgaggtgactgatgtttccatattgatggttattggtgccccagtgggaaaaggctatcacttgaatgctttgtcattttattccccatgcattcctccaaccaaattgtatttcaagttctattttcgttttgtttttcttcttgaaagtggtttgtggagttgcggtgatgaccacccgtgtgagcatggtaagcagtgacaattaatatagcaacaaaaaattggacaattagcttcagctccataagcgtctgatgagccatttgtcagtcttttggtgaaataaactactctatcttaattctctgctcttgcagcaaataaataaaagttacgaaacacccgggcaccaataaaatataatttatttcatagggcatgacagaactctttacatatctaaaatgaacatgttatttacaaatgacttgtgatactcatataaaccatggatctgtgtgctaactgctttcattatagagatagacattttttttctgattgtttaatcatttaaatgtatcattactcctaaaggcatgtgagttaaagtgactcctcctggtgtgcttaactcatgaggccaaaaagaacttcagaaatgagctattctgcagctgagatattaagaatttactggaaaggacaaaacaataattttcatttgggaatctctcagctctttactgattatcttcctgccctcatttatttttaggaaccctggtttctcaaaagtttttcatcatcactagatatcaatcagacaaaacaacattgtaagcatctttcaaattgtattttatactaggttaaaagttgtagtaatcaccgtatgatgaaaatgtgacgtgaaaattcacattgaaaatgtgaagggtcattcaaataaaagcctagatatttgaaaaacagtaattagttattttaaacggaacaagaatacacaaaatgctggtcagagtagtatataccgttattctaaagtgtaatccttgaggggattcccaggtggccctagtggtaaagaacctgcctgccagtgcaggagacacaagagatgtgggttcagcccctgggttgggaatatcccctggagaaggaaaggtcaacccactccagtattcttgcctggaggatcccatggacagaggaacctgactggctagagtccatgaggttgcaaggggtcaggcatgacttaccaactaaataacaacataatccctgaaacagtagtatcagcatcatcattggagattattagaaatgcaggttcttcagtccctgctaggtcagaaactgtgaaaagggcccaggaatctgtttcaatactccctgtgagtatttctgatagactctagagtctgtgaatactgtaaagtaacgacatagcacggccccatgcaccgcagcacgccaggcctccctgtccatcaccaactcccggagttcactcaagctcacgtccgttgagtcaatgatgccatccaaccatctcatcctctgtcgtccccttctcctcctgccttcaatttcccagcatcagggtcttttccaatgagtcaacccttcgcatgaggtggccaaagtattggagtttcagcttcagcatcagtccttcgaatgaacacccaggactgatctccttcagaatggactggttggatctccttgcagtccaagggactctcaagagtcttctctaacaccacaggtcaaaagcatcaattcttcagtgctcagctttctttatagtccaactctcacatccatacatgaccacaggaaaaaccatagccttgactagacggaccttagtcagcaaagtaatgtctctgcttttgaatatgctatctaggttggccataacttttcttccaaggagtcagcatcttttaatttcatggctgcagtcaccatctgcagtgattttggaacccccaaaataaagtctgacactgtttccactgtttccccatctatttgccatgaagtgatgggaccggatgccatgatcttcgttttctgaatgttgagctttaagccaactttttcactctcctctttcactttcatcaagaggctttttagttcctcttcactttctgccccatccaactctttgatatcctgtagactgtagcccgccaggctcctctgtccattggattctccaggccagactactggagtgggctgccatgccctcctcggggggatctccccaacccaggggtggaaccggtgtctctttcgtctcctgcattggcaggcaggttcttcacgactcgtgccacctgggaagcccgtccatatgctgaagttaattccataaaggtttaaaaatgaaaagcgaaagtgaaaataaatagaaaaaatagttgaatatgttaagtattcttggatatgggaagacctttctaggtatgatttcaaagcaagaaaaccatagagaagattgagtggttttggaaaataaaatgttaaatgtatgggagaaaaaccatcaactgaaggacatataaactacgaaaaggatttatattatagaggattcatgacattaatatattaaaatttcttacaaatagttagagggtaacaactgaacagagaagtgagcaaatgatacatttagatatgtgtatgtgtgtgaatatgcatgtatttactaataaatatactaaaaaatttaactcagtaatcaaggccatgctaattaaagcaacagggatgtgtcatttttgcctactgttttagcaaaggtaaaaccaaaataatgtaccctgtgttggggaagtttcatggaatgcattaatttgatagcttgtttcaaaatgcattaaattgtacataaactttacgctctagttccattactgggcatttattcaaaagcaataattaataatacacagagattttgctttaaagattttttggcaataattatttatgatactaaaaatttctataagtataaatgcctaaatatagagcatgggttcagtaggtaagagtgcactgtggaagacgtaagccacttcattttttaaaatgcgtacttaaatcttttaatttcatttttcatgctgaagtgtggttgacttacaatgttgtgttagtttcaggtatacagaaatattggtttgattataaatatattctttttcagattccgttccctacagtttattacaaaatactgactatagttcccttatgcagtcactttaaatcacccttagggacacctatctgttgatcttaaaaaaaagattataatatacctattatgagcatatttttatcatggaataaatgtgtttgtatcttaatgtgcatagattaagtttggaaagccataatccacagttatttctgggctatgagattatggttagctttttgtttcctttttttcctaatgcttttttaggttttctgacacaaatacattttatttttgtaataagggaagataatttaatacatccttgacattagttgatacatacaaagttatataaaaccgattgttttaaatgcaggtcaagcatttacttttaatgcattagtggcccagccctgtctgaccctttgtgaccccatggactgcagccctccaggctcctctgtccatggcattctccaggcaggaatcctggagcgggtggccatgccctcctccaggggtcttcccaacccagggatcgaacccaggtctcctgcattgcaggcagattctccaccatctaagccccagggaagcccatttacctttaactgagcacttgttaggtgttggtgctatctctagaaatacagttcaaggcatgtgtcgtaaaaaaagaagatgcataagtaaacggcacgtgaatctgaaagactggtgtagtcaggaaggcagatgtgccggttcctcggaagaattgtcgtctgggcttcatgccgccaggaggcagactgagcgagaagagatggtagagccaggttttgaagaagttcctcggaaatctgggagaggcggagcatttctgtcgtgtgtagagctggtgaagacagcgtggcctttagcctgcagttaggaaagactaacgtgcagtcagagctgagtctcagcaggaacctcagcaggaatctgcaggaaggtgctcatcaggccagagctgaccaggtttgcttactagaaagatccctctggagcagaatgcacctaaatagggtggcagcaaggagacagattggaaaatggatggcgcgtcaggcaaggcagagaaggcgtctggcagtggcgttgcagagtgaaggctgtctacgagtcagagaaggataaacctcagtcctccggcattggaggctgggagaaggaagctttaagggcgaggtgctgttactcccccagttacaggaagagagaggagtggcagggagaagggggcgccatgatgaggtctgagacagaggagcaagttgaggtgcctgttgtaatctcttacagtaatgtattatgatttcgttttgatttcctactgcagtttttggcctttcccggtgcctcagtggtattgaacccacctgcagtgcaggaggcacgggttcgatccctggctcaagaagatgccctggaggaaggcatggccaccgactccagtgttcttacggggaaaatccgaaggacagagaggaacccagcacgctgtggtccatggggtcacaaagagtcggacacgactgaagtgactgagcgtgcacgcactgcagttttcagcttgaatgttccttttacaattatctgtaacattctcttaatctcttcccagacactttgcttcatgtaaatgtggtggtttaaaggtcttcatttatataccatttattggaaggcactgtgagaccgtggtttagaatatgaactcaactccaccacttgctctgtgtgaccttaggaaagcagcctgcacctctaagctgtagtttctcatctgcagaatgggcctaattcctttaaacattcagggttgaatgaagggttccataagggcttcccctggtggttcagacggtaatgaatccgcctgcaattcaggagacctgggtttgatccctgggtcggagagatcccctggagaaggaaatggcaacccactccagtatccttgcctggaacattgcatggacagagaagcctggtgggctgcagtccacggggtcacagagtcagacgcgactgagcgcgccagcacacatgtagagctctcaccacaataatcacccaaatgtgaaccaaggttattttatttttacttaagaaagtttatgggaatatacagttttatactggataaaatatagaacatctttacacatttatctaaaactaaaatgataatatatattcactgtgcaaaaccaagggaattctgtacacattaatgtgacattttcagagacttgtaagttgaagagtcatgtgcttgtagcccaggactcgatctgtaagaaggtgatccgtggtgactgattaaactagcacggaagcagcaggggacaggtcgtggcactctggatgactgcaaggagaaacactgttagacacacacctgcatttcatgagtatttttgttgtatgaaattgcttagatccctggcagagaaacgcgttctgtctgtcgctgactccgcctccactggagtggcatgttcccgttgccctttcagctcttcggggtgagtgtggagcttccaaaggagaactcccccgagttctgagcagatggatgcctcatcctcggctttctgacctgaaacaggagctgcttgtgctcccgtcacggtgacagcgcggcctgtactcttcctctgcgggacgttcgctgtccccatctgcttgcgtccgtcgggtggtagcaccgtagccagggagcttggacttgcgtgtctggaggcccagcgctgcggctccctgctgtgctgaccgcctccgttaaacacaggtttgctgtttgggggtctcagaccctctgctgcctgaaaggcccgtttgccccggtgtggttttcctgtccaggagtgtagactttctgttcttgctcatcgtgaatttctcaaactgcaggtttgcaggcaagagctgggtcgcggcccgggcccctctggtcgtgatccagcccctgggtggaaggacacacacgtgctgggaagtagaaggttcttccccccctggagtcctgggctgccctcagggcctgtcaggaagtgcacggtgggagctgtctaccatcccgctagtttctggaacaaccagcacatttgctgttgctagcagctgccgtctatggggtcgcacagagtcggacacgactgaagcgacttagcagcagcagcagcagcaactatttcagaacttgatttttttaatagtaagtaaacagataatgttcttctcacattaacattcattccattttaaatttatgaagtttcttttctttaaaattgattcttttagcctctactgcaaggccctcacccatttcctctctgccattaagcagtgaccaacatctttgctctttttcccttaaggtgatcgcctcatccatgattaaaaggattgtctcctcaattctcttaggtaaattcactgcagatgtcatgcaggatattataggtagtcagttttctgcgatatggcatgtgtgtgagcacacatagcccctttttgctgtcctagttacacaggacatcggaagggacctgatgccaatgtgtgataaccagtgtctactaaccatggaaacgcgaagggcagcatagatgaccacttactaatggccagactcttctcttcaagtggtttgttttgacacccagtcactaagtggcttttcagagaaagcttagcttgatgggtcgtcacataagctatttgacatttgtccccagtcagaccggatgccacatgaaaaatttactcaggcaagaggctcctaggaataaacagttctccagtgttgctcacaggggacttggcaaggtgagcggaacttcagcttgtcacggatgcactgttctgacaaacataagtagatgctaatggctaaatcgtgacagaataaagtcccacaaccatatggctaattgccacaacaatatcttcagtgttattaatcaagttttcatagtgtgccatgataattggaataattaggaacagcataggccttgcttgtctgcgccgcacactctgcagagacacctcacacaggcactgccgcacaggcagcactgtctcattcagtgccgtcttttcctcagaagtgccccggttagctagtgagttaactgctcgccgtcagtgcattttgtgtgagcgtctgtagaagcacatgtatctaagcaagacccccagccccccgtgcgtccatttaaataggcagtgctcctttaaggcaggaacaggggtctgcccggtttggatcttacagtctgaaagatgaatgcattgtacactaatctggatgatggacattcattttttggccatatatttcccgtttcagctaatttagttaagaaaatgaggaattagaaagcaattgaataaattacaagatgtaagtatttgcataatttgtttcaggcaaatagtatgtaatggtgctcccaaaatgaattattttgagtgtgtctttcaattacggatgaagtaaatattaccatctttaatatcacaattgaaacctgtattttcatgttgctgatattgaaatatactgacttcagtcatttataagctaattccattccttcgtcttaatagtggagcaagaattcatttgtccggggcacagccctcattacgagagcttctcgggctgctttgctttgtggggaggtgactggacagcagaggcatgagactgatggtaaccagctccttggtggtgaagcgtctagacagccgatgaagggagacggctgttgcggctgtctgttgttatggggcttctcgtacctttgaatcctgtgccatctcagtttttctcttccttgcccttttctgtcctgttgcattccttaactagaaacaagtcttactacattttttttttttaagtttgagatattctttggatatttctttgattaaaaagtacttccccaaatctcaaaatgaaagtaactaattagaaacactgtttctaaccggggccaaaaatctttgcatcagtgatctccgaactccacaaagtttaaaatcaatgtgttacccagtttcttttatttaaatgactcttctctgtcttttttcttcctttccctctctctgggtggcatgagaggcacagagtagagactgcattaagataacagcaaaaaaatctgcgttttttttctttcagtcaattcagttaatgattatatactcattttgtgtataaaatgatttagacctttcacttctttctcctcctttgtctttttcctagttggttgacaaggaaaaatgaaactgttcatgttgatactaacatttatcataaaaattttggtatagattaaaatattaaaggcagaaggcagaggaaccagagatccaatcgccaatcattagttggatcatagaggaaagcaaaggaattccagaaaaccatctacttttgcttcattgactatactaaagcctttgtgtggatcacaacaaactctggaaaattctttaagagatgagaataccaaatcaccttacctgtctcttgagaaacctatgtgtctgttaagaagcaacagttagaaccttacacggaacaactgacgggttaaaaattgggaaaagagtgtgacaatacttaacttctatgcagagtacatcatgagaaatgctgggctggatgaatcacaaggtagaaatgctgaaaacctcagatgtgcagatgatactgctgtaatggcagaaagtgaaggggaacttaaagagcctcttgatgaggatgaatgaggagactggaaaagctggcttaaaactcaacattcaaaagactaagatcatggcatccagttccatcactttgtgacaaatagaaggggatagattttattttcttgggctccaaaatcactgtgaacagtgactgcagccatgaaattaaaagactcttgctccttagaaggaaagctatgacaaacctagacagcacattaaaaagcagagacatcactttgctgacaatggtcaaagctgtggtttttccagtggtcatgtacagatgtgagaactggaccataaagaaggctgagtgctgaagaattgatgcttttgaactgtggtgttggagaagactcttgagagtcccttgggcttcagggagatcaaaccagtccatcctaaaggaaatcaactgtgaatattcataggaaggacttagtactttggtcacttgatgtgaagagctgactctgtaaagccctgatgctaggaaagattgaaggcaaaagaagggggcagcaaaggattagatggttagatagcaacactaattcagtggacgtgaatttgagcaaactctgggagatagtgaaggacagaggagcctggtgtgctgcagtccatggggttgcaaagagttggacacactgagtgactgagcaacaaccggccacaagaacactaagccagtgtctaatggtttagttgctaatgtcctaaagtgaagcttgagctacatgtagatgttatttgttcatgtctcgctttaaataaggtgtcattgtgttcttcgtttaagcttcaggtttatcctttgtttcgatcaggatgcacatggcagcaagctaacagtaaaccttctacctcagactggctctgacattgaggaatttaattatttcatacagctgaggtcgagaggtactgcaactctaggggctcagttgagaacgcaagtattttctctatttaacctcattgtcagtttcttaatgtccattctcttgtaatcacaaatgagctacagccttccttgttctaacctagtgggaaagacagaatgaatcttcaatcaaatacaaaacaataattcttttcagtccaaatgttccagattatatctgtgcctgccccaagctgagaacagtgtccaaggagaatatcatatattgtttgaaaagtagtgagagtattagtcactcagttgtgtccaacgcgttgtgacctcatggactgtgccccgtcaggctcctctgtccgtggatttctccaggcagaaatactggtgtgggtaaccatttcttctccaagggatcttcccatcccagggattgaacccaggtcttttgcattgcaggcagattcttcaccatatatggtttcccttagactgattggagtctgccttcagagcagttgttcgtaaactgtggcctctggaccaccattgtcaacattgcctgggaacttgttagaaaggaagatgctcaggctccaccttggacccactggatcagaaactctaggggtgcagtgcggccatctgtttttttttttttttttaaactttctatctaattttggtgcattctgtgtttgaggaccactctccaccagagcaagggatgctgccagctttattctgaataaagttgggaagaaatgcacagctgaactaaattaagttcctttaggaaggaatgaagccagaatagattcttggtggccagtcaccttctctgtgctttaaaataagtatattttctctcttgcaaaattaagtgagaagtacttcatttattgtgaaactcaactatcgactgttgcagacagtgctttttatccatctgatatccatttgcctttccttccttattaaagtgaatcttagagtttgttggatatttttgctttagggatgatactgcacctgccctcgggtgtacagtgtgacacggttctgaccaattatagctaacctccagttgatagggattaatttcaaagatttgctttcctgacataggccccaccctttttgtcactttctctttctttcctatgtgatggctgtacatacagcagccattttgcatccatgagtgaccgccaaagagaatttcagagctcttggcactgacagcttgaagctgtagtagacccaaagccagcaaacacacacttcagccttctctctccagagactaaaataaaccttgtattgaagacactgtttagcttttttcttacttgcaaccaatgcagttctcatgggttgagtaacatagtgtagcttccgtaacagtggaaacatgtggctgtcctgtttctacactctctcctctgttttcttgacttgacttactgcccatattacaaagctaaacccacatgcctgaggcttgaatctcccctctccatgtcttaagtaactctggcaagttatttaaattcattaagccatagttttctgaaatgtaaaatgaggataataataaatcatttggctgttaaagggactaaacatgttaatgggtgtatgccattagccccatgcctgacacattgtgagcttttaaaaattgtggctctatgctattgacgttcttttaagttggaaactgacctatatctgtaaatattatactgttcattagcataggagtaagggcatagactataagaaaagaagttagcatgggccttactttgttgcagcacttatttggaccttttactagcagcttgtaaaactcttctgagaggactattgtgccaaagatttccagtaagtatgaataggcatttgctttcttctgtctagataacacctcaactctttttgtctttggggaatattatcacttaaattttccaacataatagctaaaattcatcctgcataatttgatattctttaaaattcaaactggcttttgtagacctctgaaagatcattgcttagattctctagtgtaccaggcattacccacgcctattcattttttgtctacagcatttaaaatagttaaatgttcaagtgggcattaatactttttgctgataaaaaaaagtagagcagtgattatcagggagtggtcttctgttttcctcagtccaggaatcatggccctcccaggtagagtcctagacggggccttctcaccatagtgtacagccgctcactgcagggctcccctggcccccagagagaggcggagaatgggtcagggcagaaggttttggcgttatggaagcatcagctcaaggatgctacctatgaaatacacatacccttccaccctcatataccctgttgatagttatttgtgtctcaaatagcagccatatttgattcttacctttcattttttgatagagaaaaacttaagagcctcgtgttagataaggccataagttgtcaatgtatgtttagtaatacaacccattgcaattgactaatttaccattttcaaaatgatcttttaagaaataattacttctcttatcttttgggtatatatactcagatttcaaggcttaggccaaattcaaatcttattttgattaaaagagtacatggataattgattttataaaggtttttgtattattcctaagctgactggcttatctgtgctttattttatctgaagacttttcctctaagattgaatgaaacatttgctttaaatacacaaagtcagatcactttggaaggaataaaaaaaattatcagctctaattatccatttcaatatcaagctcagaagagctcaaagtgttcaaaggaaaaaccctttggtacaaaggaaaaacccttgtcctgaacgcttttcgtacagtactgtataaaaaacgaaaacctttatgtagagatttatatcaaaagctgacttaccaaggtctcagtgtttggctttagtagatctttaaatcaaaggccagatccccttatccttagaacaagaaaggtgtatttactgttgtaaatgaaattatatttaagagttaggcttttcttaaaggtacgaattaagaaatagagtcttcagttttatgtaggcagttctagagtttactcctgatcccaccatttttcatagctctgtacgtgcttcatttgttaaatgaaggcataatgattacccccctcgaggatggatgtaggtttaaaagaaaatgagttccatgaggtatccagaacaaatgtcttcaataaatggtagtttgtattaatcaccgaagtctatacagatgccaggaattagcgtcgattggaatttctaaagctgctttggatgatgagtagaaaatagccccactaccttcccagtggctcagaaagtccatatttatggggcaggtcttacccgtttctgttcagttcttcggcctcctcacccgcagctgcctactcacggtcctgtccagtaactgcaccgttgaagagcctgcacttcagacatgggttctgcgccttgtctccgctcctccactctcccatctcccatccagcctggttccccgttcattcacccctctgctttcccattgtctcggattccacccgtgtcgccagttcctctgctcatttcagttactcccatgcgtctgcctgcagcacccttgtcccttcctgcctctgtgtcactgacataacccagaccccactggggcatgtaagggagcaactgaaaggtgctgcacagaagcagccatcctcactcaccttctcacttcgggtgagcccacagccctgtggagcagccctcctgccgttcctgttgccttgaacatctacccctgcctccccacgtccccaccctttggcatttatctcactgggaacccagaagggagcttgccggctcaagttcccacattctcccagccgaatcggtctctcatccctccctgctgctctccgagcctgccctgctccctgcactcaggcgctaggtcccctacccgaggaattcgttcctcacgtctgtccgctcattcctgctgcagtaagtccccctctgctgtctgttgtcattagcatttgagtatgctgtcataacctcagatatgcagatgacaccacccttatggcagaaagtgaagaagaaccaaagagcctctcgatgaaagtgaaagaggagagtgaaaaagttggcttaaagctcaacattcagaaaactaagatcatggcatctggtcccatcacttcatggcaaatagatggggaaacagtggctgactttatttttctgggctccaaaatcacctcagatggtgattgcagccatgaaattaaaagatacttactccttggaaggaaagttatgaccaatctagtcagcatattaaaaagcagacacattacttgggcaacaaaggtccgtctagtcaaggtcatggtttttccagtggtcatgtatggatttgagagttggactataaagaaagctgagcaccgaagaattgatgcttttgaactgtggtgttggagaacactcttgagagtcctttggactgcaaggagatccaaccagtccatcctaaaggaaatcagtcctgggtgttcattggaaggactgaggttgaagctgaaactccaatactttggccacctgatgtgaagagctgattcattggaaaagaccctgatgctgggaaagattgagggtaggaggagaaggggatgacagaggatgagatggttggatggcatcaccaactcaatggacatgggtttgggtggactctgggagttggtccgagatttggacagggaggcctggtgtgctgcagttcatggggtcgcaaagagtcagacatgactgagcgactgaactgaactgatgctgtcatctctttcatctgaagggataagaaagaaacatagaacacccaagcttgagcataaatccctctccagctctttcctgtttgttacccccaggtaggtcagctcctcatacagagggcagaggagctacaccatgtgcttcttcagctttgtactcttaaacctgccactcattccttgaaccacacctttccctgtgttgctgagtacagtggtcagttttcatccttttcctattcagcttctcatctttaaaaccactggtttctacctcctccttgagatactctctttactggatttccaaaatacctcattctggcttttctcctttactggctgtttcttcttgctctcctttattagctcattgtcctcttcccagctaaatgttgaagtgttgcagtacccagtccttagggctcttcatttctctgtctccctgggcggtttcacaagtcctgtggctttaaatatcttttctaagttcatgactcccaaagcgatatcactagtctctgcttctcttttgagatctaaactgacatctaactgcctacctatcatttgcaaagctacaggacttgtgaaagctgtgtccaaagctacatccttacctttctcgtgaaacttctctgctttctgtcttctcccgtctgtaaataaaagtgtcaccgacatgcacccacttgcccccctaacacctgggaatgaaccatttgcatttctttccctctcatcctgcatccatcagcaaatcatagtggctcttcagatttatccaggagctccccgcttgttcgcacactccgtcaggccagctcactgtagtcgaggtcttcattcgtctttcacccagactatcgctaatgcctcctaactggtttccttgttttcaccccagtctctctacaacctctcctctgcacagcagcaagagtgatgtgaattttaacagtttcctactcagaagcctccgagagcatttgatctctctctgttcattcaggctactctaacagagtactgtaggctggacaccttataaaccacaggatttgcttctcgtagatctggaatctaggaagtctgaaagcacagcgatgaccagctcagtgtttggtgaagtccccctccccgcttcctagatgtctgtcctccaccgtgtcctcacagggcagaaggggcgagtgagctgtaagatctctgtttataaggacacttagctcatttgtgaagacagctctcttgccagagccatcacctcctaatactatcacgttgggtgttaggattgaatgtatgtattttgcaaggatgcggacattcagcctcaggcaccatcagtgggaacagcatccagagtccttccctgccatagcccacaggatcctctgtggcccctcttcacctctccatcctcttcttcaaacacaccttgaaaaaagttgggttcattactaccatggcgctttcacacttgttcttgcctctttactattaacactcacccgcccaaagatgcccccatgatttggcccctcacttcatctgtggttcctgatcccctcatgcactttgtttttcttaatagcactcacaatttattatacgtttgttagtttgcattcccactgcagcgtaagcatgaggaaggcaagaacctaccttcttcattgctgtgtccccagcacctggaatatggtgtttttaataaatatttgagaatgactagattgcattttattttttaaaaagttctcttgtgcagagtcttcagaaacttgatgaaggctcagcagtgtagagtgtgtccgtgaagagggaaggagcgttagacatgcaggggaagagctggccagatgtgtgttatcacgggggcccaggagtggggtctgtggctggggaggagggtgtcaggcggggtgaagacagtattctggtctgtgctggggtaactgagagagcgggtccagtgagccaggtgagaatcataggggagacacctaacctggagaggacctttaggaaacagacgagtggttacgggagtggagtggatctctagcttgaccaagaagaaacgtgggtttcagtgctggtgattgtgtaggcctttactctcagttgatcagctgcgagagaaatttgagcagaggcatggcattatctgacatactttttgaaagggtcaccttagagtcagagatgagaatgcactgtaggaagacaagggcagaagcagggagatcggctaacaagctattaagggagttccctggcggcccagtgattaagactccttgcgcccagtgcaggaggcacaggttcaatccctggtcagggaactaagatggcacatggccataccacagagctaaataataataataaagcaatacatactttttgaagaggaagctactgaaatcatactcattttccactagaagtaattttccactaccagataagacccatcaagagagagatttttgtctgtctgaattactgccataagatcaccatttatagcagaagttgacatatactgcagaatagcaaatggctgtctggggaggccttacaaatagctatgaaaagaagagaaacaaaaaacaaaggagaaaaggaaagatataagcatctgagtgcagttccaaagaatagcaaggagagatatgaaagccttcctcagcgatcaatgcaaagaaatagaggaaaacaacagaatgggaaagactagagatctcttcaagaaagttagagataccaaggaaacatttcatggaaagatgggctcaataaaggacagaaatggtgtggacctaccagaagcagaagatattaagaagaggtggcaagaacacacagaagaactgtacaaaaaaagatcttcatgaccaagataatcacgatggtgcgatcactcacctagagccagacatcctggactgtgaagtcaagtgggccttagaaagcatgactatgaacaaagctagtggaggtgatggaattccagttgagctatttcaaatcctggaagatgatgctctgaaagtgctgcactcaatatgccagcaaatttggaaaactcatcagtagccacacgactgaaaaaggtcagttttcattccaatcccaaaaaaaggcaatgccaaagaatgctcaaactaccacacaattgcactcatctcacatgctagtaaagtaatgctcaaaattctccaagccaggcttcagtaatacgtgaactgtgaactccctgatgttcaagctggtattagaaaaggcagaggaaccagagatcaaattgccaacatccgctggatcatggaaaaaacaagagagttccagaaaaacatctatttctgctttattgactgccaaaagcctttgactgtgtggaatgcaatcaactgtggaaaattctgaaagagatgggaataccagaccacctgacctgccttttgagaaacctatgtgcaagtcaggaagcaacagttagaactggacatggaacaacagactggttccaaataggaaaaggagtgcgtcaaggctgtatattgtcaccctgcttatttaacttctctgcagagtacatcatgagaaacgctgggctggaagaagcacaaactggaatcaagattgccgggagaaatatcaataacctcacatattcagataataaccaccttatggcagaaagtgaagaggaactaaaaagcctcttgatgaaagtgaaagaggagagtgaaaaagttggcttaaatctcaacattcagaaaaggaagatcatggcatctggtcccatcacttcatagcagttagatggggaaacagtggaaacagtgtcagacttttattttggggggctccaaaatcactgcaaatggtgactgcatccatgaaattaaaagatgcttactccttcgaagtaaagttatgaccacctagatagcatattcaaaagcagagacattactttgacaacaaaagtctatctagtcaaggctgtggttttaccagtggtcatgtatggatgtgagagttggactgtgaagaaagctgagcactgaagaattgatgcttttgacctgtggtgttggagaagactcctgagagtcccttggactgcaaggagatctaaccagtccattctaaaggagatcagtcttgggtgttctttggaaggaatgatgctaaagctggaaactccagtactttgtccacctcatgcaaagagttgactcgttggaaaagactctgatgctgggagggattgggggcaggaggagaaggggacgagagaggatgagatggctggatggcatcactgactcgatggacgtgagtttgagtgaactccgggagttggtgatggacagggaggcctggtatgctgcgatttatggggtcgcaaagagttggacatgactgagcgactgaactgactgacacatattgggttctcgacttttttttttaacttccagttttattgagatttatttgcatttgggcactgtataactttatggtgtatggtataatgatttcacttaaatacctaattctgtaattagcacgatgtaagtttagtggacacgcaccatctcatagatacaaactaaaagaaaagtacttttccttgtgatgagaacccttagcatttattttagtgatattaattgttgtacttcacatccctactgcctatttatgttttagctggaagtttgtacttctgactgctttcatccagttctccctccctcagccccagctttggtaaccacagatctgatatctttttcagtgagtttgtttttgaactgcagttgacctaggacccagtgtgggtgctcagcgcttgacagagtgagtctgtgcttctgtgcactacccaagggtcgccatgagtggctggttgcggtctgtcagccaggcagcgacagtctgcttttattggttgggtccccctgctgtgtatctcctccccgtgactcatctgtttataactgaaggtttgtgcctctgaatttctttcccctgtttcactcgtcaactggtctctctcccctggtaaccatttgtctcctgtgtctgtgactctctgttttgattgtgcatttgttttgccttttagattccatatataagttagggcatgtgttatttgtcttgctttatctggcttatttcccttagcataatacctctgggtctgtctctgttgtcatgaaaggcaatatttcattatttatgactgagtaatactccattgtgtacatatatactgaatcttctctgcccgtttgtctgctgttttcgtatcttgactattgtagataatactgctatgaacattggggtgcatagatcagtttgaattaatgttttcattttcttcagatacatacctagaagaggaatgtttggatcatatgctagtttcgctttatttgaggaacctcctcactgctttccatggtggctgcctgaagttacacccccaccaagagcacacgaggatgcccttttcttcacatctttgccaatacttgtcctttgcttgttttttttttttttttttaaataataaccattctgacagatgtgatgtgatatctcatcgtgattttgatttgcattttcctgatgattagtggtcttgaacatcttttcatgtgcctgttagccatctgtgtgtcttctttggaaaaatatgtctattcaggttctctgctcattttttaatcaggtggtttgtttttttggtattgagttttatgagtcctttgctatttttagatattaaccctttaccaaggtatatatcatttgcaaatatctttttccattcagtaggtaactttctttgttttattaatagttttcttcactgtgcagaagctttttagtgtaatatagtcctgtttgtttattcttgcttttgttcccttgcctgaagagacagatgtaaacatgtgctgcttagacttatgtcaggtagtgtgctgccttcgcattcttgcctttacatgcttaatccactttgagtttactcttgcatatggtgtgagtagtccaatttgattcttttgcatacagctgctcagttttcctggcaccgtttattgaggctatccttttctctggtgtatactgcctcctcggtcatacagtaattgtccgtataagtataggttcatttctgggctctctgctctgttggtctgtgagtctgcatttgtgctattactgtactgctttgagtactatatctttgtagtgtagtttgaaatcagggagtgtgacccctccaggtttgctttttttcatcaaattttttttttctgctatttggtgtcttctgtgtttccatacaaattttggaaattttgttctagttctgtaaagaaaggttattagtcttgatagggattgcattgaacctgtagattgccttgggttacgagttcattttaacaatattaattcttcaagtctacgaacacagtgtatctttccatctgtttatgttgtcttcaatctctttcatcaatgtattatagttttccaaatatagatcttttacctccttggttagattcattcttagatattttattcttattgattcaattgtaaattagattgttttcttcatttctctttctgagagttcatattggtgtatagacacagaatagatttctgaatattaatttttttctgcaactttactgtatttattctaatagccttttggtggcatttttaggattttctatatataatatcatgtcatctataaacagtggtagctttacttcttcttccttcccaaaaggaaaaagccttctgtttcattttcttgtctgattgctgtggctaggacttaaaaatagtctgttgaataaaaggagtgggagttgctatccttgtcttgttccttaccttagagaaaatgctctaagtttttactgtttcatatgatgttagctctaggtttgtcatacatggcctttattatgttgaagattccctctgtacccgtcttattgagaatttgtgtcataaatggatttgaattttgtcaaaacctttccctgcatctatcgggatgatcgtgatttttactcttgtttgttagtatgatgaatcacattgactgacttgtggatatcgaactatccttgcatcctttagagaaatccattttgatcatagtatataatccttttcgtgtactcttgcatttggtttgctaatattttgttgagaacttatgtactgatgttcatcaatgatattggcctttaattgtcttattgtgtggcatagttctctggtttcaggatcagggtaatagtaaccttgtagaatgagttcttgaagtgttgttgctcttcaactttttcaaatagtttgagatggataagcattaactcatgctgaaatatttggtatacttcaccagtgatgccatctggtcctggacttttgtttattgggaggtttttaaattactattactgattcattttcatttctgataattggtatgttatagtttctatttcttcctgattcagtcaggatattgtatatttctaagaatatgttcattttttctaggttgtccatttgattggcacataatatcatattagaggggcttccctggtgactcagatggtaaagaatctgcctgcaatgcaggagacctgtgttcaatccctgggttggggcgatcccgtggagaagggaatggcaacccactccagtattcttgcctggggatttccatatacagaggagtctggtgggctgtagtccatgaggtcataaagagtaggacacgactgagagacttaacctgaacacagtgtcatattagggtttccagatggtgctagtggtaaagaacctgcctgctagtgcaggagaggtaaacaacgcaggctcagtccctgggtggggaagatcccctggaggagggcatggcagcccactccagcactctttcctggagaacctcgtgaacagatgagcctggtaggctgcagtctataggatcgcaaagaatcagacacagctgaagcagcttagcatggagcgtgtgcaatgtcatattattatcaattctcacttctctttttatatttctgattttatttatttgatttttctcttttttttcttgatgaatttgacctaagggatatcagttttgtttatcttttcaaagaatgagctcttagttgatgttttctaggctttttaagtctctatgacttttctaatactaaatttggggtgttgttgtttttctagttcctatagatgtatggttaggttgtttatttgagatgtttcttcttttctgaagtaaggttgtgttgctataaacttccctcttagaactgcttttgttgtgttccttagatttttgtaacttcgtatttctgttttttttttaatctccactttaatttcttcagtgacccactggttatttagtagcacagtatttagtttccacaggtttgtaggttttttccttttagtagatttctagtctcatagcattgcaatcagatagagtgcgtgatctgatttcagtcttcttaaatttattgagacctgttttatggcctagaatttgacctctcctgggaaagacatagaaaacaaacctggggttaccaagggaaaagggaagaggagctgttcagtccagttcagccgctcagtcgtgtccgactcttcgcgaccccgtgaatcacagcacgtcaggcctccctgtccatcaccaactcctggagttcacccaaacccatgtccattgagtcggtgatgccatccaaccatctcatcctctctcgtcccattctcctacccccagtccctcccagcatcaggatcttttcaaatgagtcagctcttcgcatcaggtggccaaagtattggagtttcagcttcaacatcagtccttccaatgaacacccgggactgacctcctttaggatggactagttggatctccttgcagtccaaaggactctcaagagtgttctccaacaccacagttcaaaaccgtcagttcttctgtgctcagctttctttatactctaactctcacatccatacatgattatggaaaaaccatagccttgactagatggaactttgtcagcaaagtgaagtagagctactgtaaaggcggatgctatcaaagtgttgcactcaatataacaatataatatgttaacaaatctggaagacccagcagtggccacaggactggaaaaggtcaaccttcctcccagttcccaggaaggtagtactgaagaatgtgcaaaccatcagataggtgcactcatctcccatgctagcaaagtcgtgcttaaacccttcatgctggtctttagtggtacgggaaccaagagcttccagatggcaaagctgggtttagaaaaagcagaggaaccagagatcaaactgccaacattcgcttaatcatagagaaagcaagagaatttaataaaaacatctctctctgttttattaactgtgctaaaacctttgactatttggattataacaaactgtggaaagctctgaagagatgggaatatcagaccaccttacctgtctcctgagaaacctgtatgaggtcaagaagcaacagtcagcacccctcgtgaacaactgattggttcaggattgagaaaggagtacgacagggctgtctgctgccagcctgtttatgttacctatacactgagcgcatcaggagaaatgccaggctggatgagttacaagctggagtcaagacaggcgggaggaacagcaacaactgcagatatgcagatgacaccactccagtggcagaaagccaagaggagctaaagagcctcttgatgagggtaaggaggacagtgaaagagccggcttaagactcaacgttcagaaaactaagatcatggcatctggcccattacttcatggcagatagaaggggagaaggtggaagtagtggcatcattttgctcttcttgggctccaaaagttgctgtgaacagtgactgcagccgtgaaatcagaagactgcttctcggcaggaaagcgatgatgaacctagacagcgtgttgaaaagcagagacatttctctgctgacaaaggcccacatagtcaagactgtggtcttcccagtggtcacgtacggttgtgagagctggaccgtaaagaaggcagagtgccaaaggcaggttagatgccttctaactgtggtgctggagaagactcgtgagagtcctttggacagcaaggagatcaaaccaatcaatcttaacggaaatcaaccctgaatactcattggaaggaagctgaaccgccagtattttggttacctgatgtgaacagctgactaattggaaaagtccctggtgccaggaaagactgagggcagaaggagaagagagtgtcagaggatgagctggctggatggcatcagtgatgcaatggagatgaacttggacaaacttcaggtgatgatgagggacagggaggcctggcatgctgcagtccattgggttgcaaaaagtcagacaaaacaggagctcagcaacaacaacaacatgaagtaagcagtttgcttctttacaagatataagcacaaagacctgtacagtggtaatcaatgcagtatcatgagtaataacaaagggaggagtctgactgcacccacaataaagaatgggttggatcatgatacatgtgctcagtggaatactgtgcagtcgcaaaacaagagaaggtatttctgtaaatgctgatttagaatattttccgttttagcaatcatgttgttgaattttaaaatgcatgatacagtatctccccatgtctgtttttaaaaggtgtctaggtgcctaaaaatgcctctgtgttatggaaacacacaaaagagttacctttgggagggtggattcagagggaaattacttctcactgtatgtctcatacatgttaaaattgcttttcaccttgcaaacaagccactcaaaataagcaaaataataacccacatagctttctctgtaattacaggacctagagaaattctgggagtgaaaaccgcagtgagataggaggctgtggtcagagtggcatttccgccttggagactggagattcgtagcttcacagactagctttcagccacggtagctgctagctgatgtggaaaggaaatgagtgctgttgatgaaaataaatttgaagtattttatgggatgtttttgtgcttcatatttgagttgctttacgagcagattaatttatgaacatattatgtaccatgatgccctcagtaagctagacttcattgagtttctgttctctccgtgagccgatatacaatcctagacctcataagtctttctaaaatcggctgaccaaaagtggcaattaatttttctttgtaagttcttagttctttatagtttccttaatgagtttccttgaaaggaagcactctaaatcttgtagggtcctgtagttgtaattaccactgtattgtaactggagtactcatgaaattgctgatcatgatttatcaaagtaagtccttcagaaagctccgtttcttcaactctgaaaaactcgatgaccacacggatgatcgcaaaagtagttaccatgcattctgaatcctgtgactcggacacagatgtgcagaggtatttttaaaatataaatctgggttagatgtctttttggacttatagaggagaattcaagaggagcatgaaaaagcagagggaactctgagcttggagctgaatacatcttcagtctgtttctggttggggtgtgcacgggcctctgctgaggcgtctgtaacaagtggctgcctgcccacccactcagacccgtcactctctactgcagggtgagcagagtaacgtcctgtctctgaaacatgcagtttctccacgggtgattcatttccacatgtattccagaggctgctcgaagaaatattgctcttggagagttaaggctcgtttttagatcatgtattcgatagtacatctagaaatcaagaagtcatataaggcatgatacttgccataatcattacagattataacatcttctatgcataagaaaatactttttttttttttttgcttagtgtatattcctcttcttaaagacataagcacaggcacacagttgacggtgaagttgtttagacactgagcttcagctgtcaggagagagctagggtcaagcggagccgcccaccctgccctcttccgttcccattttgcctccactggtcggggagtcaccgggacagttgggttggatggggggtgtgactgccctccttccttgctgaatccctcagtctgccctgccccctcgaacgcatctggtccccgttcagacacatgcctctcctcattcacctgcactaatgggtgggaaccagggcacatgtaatcccaaatggtggataatccaaaagcaattaatacttggctttgaaatgtattcagtggtgttttgaattgttcttaccttcctaattatattgtgctaatgttgccattagttgggattccctgaacataccctgggtgatggggacactcggtggggaggggcaagtgaagcggagtggcagtgggaagcccaggctgcagggctttggattcagagtttgctttggatgttaatggttgaaagctgtcagcatgtcactgggtccagggcccagcagagtacctgctgcacagttgacgttcttgaggaagcatgtgttcagtgaaggctctcagtgtttctcatagtcgccttacctgtggtctgatcagggctgggatgagcccgcagaggaagtcagtgaagggtggccatggtgtcctccccagcccttccgcccccagcttagcagagatgagtgctgccaagccgtggacatttttccaatatggggctgacgttataggctgtttcgccggctgggccacaaagattagcccctcagtagcaggcacttaattcagggacccttgtcaggaaagaagctatgctattcctttaaaatgcaaggagatactttgaaataggcacaaagaagctatgtattcctttcattagaatatagctttccattgcaatacaagcctctaaagtaaaataacaataatatagagcatgacttcttactttaaggtccatggatcagccgaactcctgaaattgcttgcccatgagtgtgtgtgtggatgtatgtatattttagaggagagggttcataaacttgattaaagcctcagaggcctccacagctcctctctgatcacataggggattgaatttgtttcactatttcgtgcttttcataaaattttgttaagaggcaaacagtacacgaggtgcccctgcctctctatcttgtctggctttggaaacaaggttgttgtgaagctggaactgtagcttgttctagactggatacaggcacaggcccaacagccgggtgtttacatacaaagactgaatgtgtaagtgggaaacagccaggcagtctagaacaagagattgctgacctgtgtgagaagccaagccaccacctttacagcaaaataaactcgaaacagtcaggatttggtcatggactgccagctcctatatttttgcctgcttccaactcaggaccaactagagaaagctcacgtggtccccagatcagtcacaaatgactctctccctcttgtcagcccaccaccatccttccagcttccagtccagcagacttgaagccttctctttgttttactacgaagctttctctctgccctgactgcttctgatcctttgctgaaagcaggtgatggtagctgattcccttgctatagcaagctttgaataactagcgtctgcttgtcctcattcaggtggtgttcctttgcttcaactgtgcatggagatttgagaggttccagggaaacgcccttttcctggactctcttccaccaggacattgtggatggtagtagtaccgttggggagcactctttgtagagtttagcgctttatttttttcaggtagaacattctaaagtcatgttttattttagagacagatctctctgagcgcagaaccttaaggtaagaatggattacaggtagcacagaaaacaccaagtggatgaccattcagccaggcccccaggattgcagggcttctgcgtggggcggaggaggatgcctttcaggtcctggcagcactggggtgctctgccccctgtgtgcactggatacccccgacacacactatgggctatgtctctgcacttagatagtcacccggctcctgccacctcccagctctctcacctccttgaagccaatcacgagagcactcgggagagccatcagatcaggactggacacagagggccccacacttagagtgttcagtcaaccgtcagctgagattgtaggtaaccgtcatagtaagtttatattttaaaaactgtgacctgtaaatgttaacttttaaaatgtcacaatgtttatgtcttgttttggcctttcttcatcttgtgatatcagttcagttcagtcgctcagtcgtgtccgactctttatgaccccatgacctgctgcatgacagtcctccctgtccatcaccaaatcccggaatttacccaaactcatgtccattgagtcagtgacaccatccaaccgtctcatcctctgtcgtccccttctactcctgccctcaatcattcccagcatcagggtcttttcaaataagtcagctcttcccatcaggtggccaaagtatcggagtttcaacttcaacatcagtccttccagtgaatattcaggactgatttcatttaggatgaaatggttggatctccttgcagtccaggggactctcaggagtcccttccaacatctcagttcaaaagtatcaattcttcggcactcagctttctttatagtccaattctgacatccatacatgaccactggagaaaccatatccttgaccaaatggacctttgttgacaaagtaatgtctcttctttttaacatgcttcctaggttggtcataactttcgttgcaaggagtaagcgtcttttaatttcatggctgcagtcaccatctgcagtgattttggagccccccagaattaagtcagccactgtttccagtgtttcccatctatttgccatgaaattatgggactggatgccatgatcttagttttctgaatgttgagctttaagccaactttttcactctcctctttcactttcatcaagaggctttttagttcttcactttattccgtaagggtggtgtcatctgcatatctgaggttattaatatttctcccggcaatcttgattccagcttgtgcttcctccagcacagcgtttctcatgatgtactctgcatagaagttaaataagcagggtgacaatatacagccttgaggtactccttttcctatttggaaccaatctattattccatgtccagttctaactgttcctccctgacctacctacaggtttctcaagaggcaggtcaggtggtctggtattcccatctctttcagttttccacagtttaattgtgatccacacagtcaaaggctttggcatagtcaagaaagcagaaatagatgtttttctggaactctcttgttttttcatgatccagcggatgttggcaatttgatctctggttcctctgcgttttctaataccagcttgaacatctggaagttcatggttcacgtattgctgaagcctggcttggacaattttgagcaccactttactagcgtgtgagatgagtgcaattgtgcggtagtttgagcattctttggcattgcctttctttgggattggaatgaaaactgaccttttcagtcctgtggccactgctgagttttccaaatttgctggcatgttgagtgcagcactttcacagcatcatgttttaggatttgaaatagctcaactggcattccatcacctccactagctttgttcgtatacttggaatttaaaaaaatcagaatggcccagtttctcccaccctccactgggccttctccctctctctattgtctgtgtctcccctttctattggatcgtgtttatatagtaacttctctgcggggagaggtacagatgtcagtagagctgggatgtgaagagaggttgggcttcctgtccccccattagatggttagtgggcgtgggtccagtgaccacacctgttgggttaactgactagaagaccccaccccggcctaagaggggatgggagcagaaaccagaacctcacctagtgattctcacactgtgatctgcgatcagccgcatcaacagctccaggaaactagcttgttcagaatgctaatgatcaggacacatctaagtctcagaatcagaatctgagacttttagcatgggctctaacagtgtgttttactcagcctccaggcttttctgatgcatactaaagcttgagaccattactctaattagaagagccaaccaatagtttaagtcttttctctcctcctagcataatgtttcacaggaacgcatggtgggtttaggagcgctgacagctggcagcaaaatgaattggagaccgagaatgatcacctcatctgtggctcccaaaacctagtacacacggagatctcctgaagccttgtcaaagcgcagagtgcggtccagcagcactgtggtgggcgcctaggagtcttcattcttccggaaagctccccagtcatgcgtccggtcctgggatcccacttgtgcgggcagagtcctagcagacgccaggccaccagctgtggtgcatccaaggcgcaggcaggcaggaggccagggttccggaactgaagggagagcgtcctagcgggcctaggcggcctcggtcgattcctccccgggtgtgatcactcactgctagtgtgtgttcccagggatccctccagagatgagggccgcacaggggaacgtctgacgagcagccggggaaccctgtgagcggtcaccgatgcaagcgcaagatccggaagatccctggttaataagagcgggcctgggaaagggcggttcttgtcaattctggttttgtttttatttttgcttttggctccacagggccttcctcgcagcatcgggcttcctctggttgtgtgcttggggttctcggggaagcccaggctctgaggcgctcagcgttgccgcactccggctggcggctgtgccacccaggttcagctgccccgcccagggtctcagatccccgcccaggggtcaaacctgcgtcccctgcttcgaaaggtggattcttaaccagtgggccaccaaagaagtccctattcgtattactttaataaacatttactgactcctgtactctgtccaaaaccaaataaccccatggagcttgtgatctgctggacaagatcacaagggaagaaaaagagaagggaaaccaaaccaaactgtcataaccttttagctgggattttttattggtgcctttatctctggtcattgtgactgtggagcctagtagatatggagtctgcaaacatcaggcctgagtcttgcgcttgtcctaacctctgaggggccaggcagggttggtgccccttgtagggtgggggtgggggagaaggaagagagggtccaagaaaaccaccctccagaaggtgttcgaagctccctggcagcggcaggccgtcgcatggaaccgtcaccactgctgcctccgaggaagggctcagtatggctctcctcatgatgtgtgagcggcctgcaggtgtgcggtccagcttcctaccgagtcccatggaccctgacgtttcctagcttagggttaaacctcatgtcagttcctccaacgatacactgtatatgagtgcattcggagatttaagcagaggaaactggaaactgttactcagtgaggctgattccattgctatatgaaatagtctgtggcagtttcaaaaaattaagtcgcctaagtgttgttttttaatgagtttcatattaggaaggataggagcaattagcttcaggaagcctcggtatgctctttagaacactgactcgctcatagctccctttcccagagataaagtgacagaacaaagcctactgatagacttcctagaagtaaaatttgtttgtagtataaacaaaaactagttttcacagagcctaaatttaattactccagtgtgaccaccaaccgtccgtcagttcttcgtgctataatttataggtcagtgcggcctgcaagtcattttcaatgcgcagtgcctcccctgtagtgaagcccaaacaactgatcggacagggagactgcttctccgcagccttgacccccgcgtccactcaagtcagagcgggggttctagctgcaccccgggcacagtgtgcagtagtgagagcgcagtctcatctcagaactaaagcagtattggactacgaccgtccttcagtagatttatctgaacttgctggtaaatcgtacatcctaaagtcgcacagtccgtgaaacaccacgcttgtaatccaaatggcaggtctgcctctgaaagagggacgtgtgcatgcctgtagacgtgcggtggtcattctgtgccccacgcgctcagagcatcttgtccccctggaaagccatggacgcacaaggctttgcttcccatgcaggctatttttgccaagggtgtattgcagttgttttgacaaaatagcttcaaacccttgccaaagagaataaattgcagtagaaatggtgataattattaggaacttatttttggaaacagaaaccttccttaataaggggctgtgtgctgccctctgaaaggaacagggaattttccccaaagtcagaaatatacttttaacagttactgtacttattctgtggagattaagttaggtttagcgtgttttcccagaaagccaaattcaagctggttcaaccgtgtattataaggagtgcttagaaagtagatttgagttctttaaagataataattaatttgaagttacagtttcttgtgtttttatagtggagtttgatggacatgaagtattcacatgtttctgtaatatatgcagatctcaaatatttttaagaacaaattgatatatttgactaggtaaaaaaaaaagtagcaaacaggctaagcatcttctaataatttattctgcagagctgtaagaataaatgggaaacgagaattttgccgtccattgtttgtacctttgctctccaaaggagttagatgagaacgccttgtgaccctaattataataacctcagtattttattgtggctttaagactgctttcacagagttgacataaaggaaaactcgaggtaaattaattcagaggaactgagtgcagaggagcccagtagaagaggagcctaagtcccgtcaaggaggcgacaggcgcaaagaccaggcctttggctacttctggttttctctgatgcaaacaccacatttggattctgtgttccttccccactagtcatttaaacattgttacctttgaaaagcccaggtgaacgaaaacaaaagattaatatcattaagcaaaaatctatctgtgcttttgtgttcttatattcttacccagtgctatcatttcatgatcacaggttacttaagatgccctaataatgtttgttacattaagttgaatataccttttccatttcacttgttcttctgaggtggctgtacccatatctcggaagaaaaaaaaaggaagatttagtatactgattgctttctgcatacataacccaccacagccatgttggagcaaggctgttttttaaaacctcagtcaaattggtcattttcataagctgatcagtaaaaagtgtatttttcttggtgtttccatgggtcattcactaagcaataacaccatcaggagttactgatcccaagggaataacggcttaattacacagaaatttaaaaatgagagtagtgttgcatgagtacagacatagagactgtcctgtctttgggtggtttattattaaatttaatacatcagatggtctttttggtttgtgcagattttaattactaagtaagtctggtaaaatatgaattattgtattaacacaagtgataaaacgtacatggttacgagcattgcaatctgtaggtgtaatgtacataactcgagattaatagtatcaagcaattaaactgaagttaaaagaaggtttaatgctacccttaagtgtaacttaaactctcgctaaatatttttaactgcaatgaaagcatgttaattttaggagtgacttcttttacaagacctcatttcttagagtacgttttcctttctaagaatacaaaagcacactgaaatactttctgctggtaactcattccataaagatttttttttcttggcttttaagctcaatgaagaaagcccaaaatagcacaggaagttttgtgtggtgaatatatgtatgaactaaatctagttggggtaaaagtgattaaattattgataagatcattgttgctcccaaagcgtttcattagtcataccaggacttcttaaatattttgagaatttggccttaattttcctataagtgcatattaaatagaggaaaatatattttgctttaatttaatatccttatatgtacaacccattaagagtcttatatattgtgcttagttgctcagttgtgtccaactctttgtgatcccacggactgtagtctgccaggttcctctgtccatggagtttgtcaggtgagactcctagtacgggttgccatttcctactccaggaaatcttcccacccagggatcgaggctgggtctcctgcttcggcaggcagactcttgaccgttgcatcccctgggaagcggcttggtcagaaggttcctttggattttttataacatcgtacagaaaaactgaacacattttttggccaacctgagaaacatgctaggcatctactaattaattctttccttctgtgtttccgggtttcccccacttcctgaattatttttaggttgccactaacaagatcaacgcctatatttccaatttggctatgtctttgcttctaggtagcgtgacaggtggcattacagtgagtttaacaaagatcttggtgaacatgtaaaacactgagcaaaatgttctcttacaaagaagaactcgctggctctgtgtgtgagtgtgtctgtcagtgtctctctcatacacacacatacaccaaatatggtctttgccctggaattatttaccagtgtacttggcaaggtgaaacctaaaagataaggcaatgtggaacatttatgaagtggcgcatcacagcttccacattaaatagagaagcactgaagactcgtgtgctgtggtcttgaaggtgtgttttattcactgtcgattgctgggtgtctgagccccctgcccgaccgcactgcacgtgtgtcgtagcagagtgggttccaaagctaggctagtgcaacccggaatggcaggcacattgtaagacaggaggtttgggcagtaactgagcattttgtcacaaaaatagtaaaactatatattatttctgagaagtaggctcctttgtcttctctgcattatccgtgatgaagccaaagatacgattgtccctgaggaaacgagaggagtttggactttaagttagaggggaaagatggcattgcatttttgtggcatgtattaacctttattagttctttactttttttgacaaatgacgttttttgtaatatgatacatcacctttttttcaaaaggcattttactttccgtagaagataacaggaaaaacacacagaaaaaaaaatgtccctccacataaggcctcacagaagcagtgtctctggggaaactgcagcaggagttaccatgggcttattcaaataagggaagcatggaagtcagctccaggcgggaagggggtaggttcagggcctaggattacgttgttggtgagtttcatgctggcatctggatttgaaaccaggaggaatcactttaatgtcagaatatgtaattttcaaagtgccaaaatttacctatccgtcaaaccaagataattctcaagtttatttatttacttctatcttccagttgtgttgagatataattgacaaataccgttgtagggatgtagcagacatcattgtatttgatgtaggtgcatgttgtgaaaggaaattaacacagccatcacctcacgtgcttatctttattattattattttggtgagaacatttaagttctttctctctcagcaaatttcaattacacaacaccctgttaccagctgtggtcaccatgttatacattaggtcctcatcagtttttttcactgatggatttttcttcagttgtgtcagttggataactgaatgaccatgatctaagtgattgtaatcacttaattttgccgatacagttatcagtttaaaggtccttttaacaggtccaccatatggtttaacccaggtgctttttgctttgcccattctttgcccattggttccaccaacactcttgaaaaagcaattaattgtttttaattaagaagagcaacctgtgtaatttagggatattttggtgcttcttaaaatagtaaatattagcatttgtaatttaaaagaattagaagtgtgtatagaaataatgttttattctaagccacataaatataggcatactagagaaaccacacatacgcagttgtgttagcagcctttcatattagcagtggggtatgaattcaaaggtggatgaaaattgtaagcaattctgtaacatttttaaatgctgatgtcacttaggcgttaaatttctttcctgaaaaattgagtaacataatttaagatgtggttgaaaatataatttaatttttctgctgattaatttggtaatatgaataaaggaattcaagtatttgatggtgtggctcttaataaactgatatgtctgtgtattttacactgttttgtcacagctttttgattccttcttaaacgtaatactccctgaaaaaagtagtgtctgatttttttttttggcctcactttaacctcacagatggttatatttggttttgaattttgcaaagaggtaatatctctgaactaatctttaaagaatggcccctattctgtgctatttcttggtactagaaatatagaatttttgagtctttgttgtgtgatagaatcacatagatctctagcttgagttcctagagaaaggcttgagtaaaggaattatagccatgtatataaaattagaagtaaatggataaaaatatatcaagtgaactgttttaattttcttataagaattagatatcactggcttagcatttgtttaaagtctgaagtgttactatttatgatgtatatttacagacaaaccttgtttactattcttgttagcttcttggatctgctctgtagcatctgtgtccattctcctggccatagaagtgactgtgttttgaaataatacccctagaaaggtaacctccttgataagttattctgaagttaaaaatcaagtatcattatatgtttcatttgagataactgtctacgcttgacaaaaaacatctgtctttttttcacatttaattttaaaatgaatatttttacataggagtgacatgtcagaatgcagttttctgtttgactacagtaattcgtcgtatgaccatttgcaaaagtctagttaacaaaaaaagtcagtagtgatataaaattttggaacattattatttaattcataaccttacaaatgaggtaactatcagactaccttcatttttctccttgcctttttgagatttatgatttctaatgcatacgaaagatttctacccttttcaaatattgtacttgtgttgtatacctatatgaacaaagtttaatgagtgtggcctcattataaaattacaaaatgcagttgaaagcctaaaacttggactttactgtattataattttttatataatatttgctcggtgtgatcagttaaaaattatgattttttcacagctacaggagaagatggttcctctttatattgctctcaacagtactgtctcctgaattcagcttttgtttcccgcagacggtgggtgcggctgctgttcggccgagagttcccgctgcaggacctcctggtggtctgggacgccctgttcgcagacggcctcaccctgactttggttgactacgtcttcgtggccatgttgctgtacatccgagatgcttgtaagtgctaatggccgtgccagcatgcagtttggcggtcctgagttttaaactgtgtctcttaaatgtactttaccttttattttgaattaccatgcctacatttttatcacaggcagtatactggaagtttcagaggaacatactaaatatatttttgtgagttaacatgtatgtatcagatgtgggtaattttatcctgagagaactggaatattcttcagaaccatttttctaaagactttcctccggctttgatctcgtcattacacacatttgtgaagcatgcatagaaaaagccagtgtttcagatatgtttagagcgccaccttctgacaggtagggagtattcaagaatatttatcagaagataggagctgtttttatagtatcaacaacttgccaataaaaaataaatactgcatttaaagatactctaacttcttagttaaattttgaccagacgtatttctcaatggagtgcccagtggcagatgtattcctgtctcataggatctacctttcggtgcttgcctagctggaaagcctgagcctgcccctttggaatagtctgataatcctcagcttgaagagaaaagcagagcatgttttaaatttcagaatacctcaaattgttttccttttcaaaaggaagaattcacaaaaccagatttgtaagccaaaatgtaattaggaatgtttgcacaaagcgatgatgaagtaggaaataaaaaactactgtaagagtgggactttgtcagaagaacatgagactatttggagccgttcataatcttgactgttaaattactgtgcggttctctgtttattcattagatttcagttgtgccagatgctgttgttatccctctggtaaaactaataatattctttaaattctacattacacttttaagattcctcccaaagtacttgaatgaatgaatgacgggagcaccacattttatccaaagcttgtcattctattctgtgccttgaaggtcagatagtttgggttttgacatacaaagtagaaaattctttctttctgggtaagaacatggaaatcataagagaaaataacctgggaagtagaggagaatgtttggttagattttaggatatttaatgttaatctcccactgaaaaatagtatgatttttataaagtataagtaatgaaaaacaaggaaatcagtcctgaatatttattggaaggactgatgctgaagctgaaactccagtactttggccatgtgatgcagagagctgactcactggaaaagaccctgatgctgggaaagattgagggcaggaggagaaggggacgacagaggatgagatggttggatggcatcactgactcaatggacatgagtttgagaaagctccaggagttggtggtggacagggaggcctggcgtgctatatagtccatggggtcacaaagagtcagacacgaatgactgagtgactgaacggactacatgaaaaacaaaaggaatgagaagcctcctttatttaaaaaattacttttggataatattttcaaaaaatttttcaagccagacaactattggaatctattctgattttctgtagtcttaactaaatatttactcttccattaactattataaatcgcaaccatatttttaatcaccgtgtttcctatcctaagatgtggttttaaaaattaatttcagaaaacttggcgatttgggacagctgaagcctttgtccatttttaagaccttatagaacacgtagacacaagtgaaagaaacatggaggtaatgaagttgtgtattttataaagtcctagttatttttatttgcttgtttcaatccataacaatgggtgagacttcctaaaaataggatgactatttgtgaagtatttaaggggcagtgcccctgtccttaggaagtttaccaactagtaggaaacattaattagtaggcctagtaatggtaggagctggtaggacaaggtctaggagaacatggctggttgaagtctgatgtttctggtcctgcggtggaggaggcagcaggagagttcaggagaggcgccaggctcccctctgggcaggcgtgtgacccgaaaaaatgctctagacgcaggtgagtgagatgaggggtctgcagcgtgaacagagaagctcgggagagacagcttcatggggggcgtgtgtttgttttcacaagctgcctggtttcctgagagtgcaaagcgagagtgacgcacaggttgtgagcatgagggagtcaagaacgaatcctgatgagaatcctcaccctggaggtgacgggaagccactgaaagggtcggagcagcggtgcgggcagtctcaggttcctctggctgcagggtggagcagactagaggcagacaggactggagcaaggaaatccgatgaaaggttacgaccacggtccaggggcaccaaacgggtgagggagaacaggaagtgcacagtgagccccagctgggagagcttagcagccgggtcgtccgtctgacctggaaaggaaagatgaggattagcaggttttcggaatggatatgactgtgtttcagctatgctgaatttgagagatctgtaagaaatcggggcttcctaggtggtgctagtggtaaagaacctgcctacaaatgcaggagacataaaaggcatgggttcgatccctgggttgggaagatcttctggagaagggaatggcaactgactccagtattcttgcctgggaaattaggggcagaggagcctggcgggctacaggccagggggttgcaaagagtcggacatgactgaagcagcttagcatgcatgcacttaagaaatcagtatctgaggattggaaaataaaattcactgtcagtatcaaggctacagatttatttttacaaattgtgtttgttacaaccacaacagtggatgtggtctcccaggagaatagagggaccatatatttgcagtctgtatggaacagtcttagttctatacactcactgttgaagagtagtaattattaacgctgccttctttcactctcaaaggcaccccattaagatcataggaattacatggtcagtttacctgaggtagatgctctcagaggaaaatgggtaaaggtgtttcatatcagtatttaagaggctccaggaacggaagaccttgtgttgtaacgcctcgaagctgttctgtagcgtcagggaggtaccgggtcaggagtgcaggggcacagtcaggtaaggctgggaaagtcctcctgtggacggaggaacagacattggagacctttgccaaagtgggttccatggactgggggagcggaagctggatcatggtaggttggtgagtaactggacagctcagaactgcagtagcctcttctgcattccttttgtctcatgtacacattccattttcaactaaaagtagctaattgaaaagagtgtgcagatagcacgtgcagagtcatctttttaaaaagtccacagggaagggaagaagatagtcgcagttagaggtcagtggagggcaaggaaggtttgatggagaaggcaatggcaccccactcctggaaaacctggaaaaccccatggacggaggagcctagaaggctgaagtctgtggggtcgctgagggtcagacacgactgaacgacttcactttcacttttcactttcatccattgaagaaggaaatggcaccccactccagtactcttgcctggaaaaccccatggatggaggagcctggaaggctgaagtccatggggtcgctgagggtcggacacgactgagtggcttcacttgcacttttagagggagccggtcccagctcccagaggtgtggagagctggtggagaggtgcttctcaagccagtcgagcttttccttcagagatcagcactagtatttcagtctagtgaggaggatctatgttattgaaagctgcgttgttcatcactggttctgaacaccgcctcctccactgcccagtctgtcttggtgggcctccgtatcccagcctatagaactggacccagggcatagtagtcctcctgacacatatttttgggggaaataatggaagaaacaagggcctggaggcagtggcgtggtatcaggagtgcgtggaaggaggtgccagtttctggagacagtggctggcagggtcactcagcgcctgataaaggatgaaacccgctgtctgtgtgagcagggtggggcggggctgggcccgggaggtgtgggagcggctgcccgagaactcgcgccagcccctggagctgtcagggagcctgtggggacaccctgggccctggcacctgcgatgctcgaagggcaggatccgcagaggccaacagcgatccaggcctcacgctaggcgcacgcccggctgcagggaggcaggtgggtgggggtgctgagttcgctgtcagggagcgggttaggaggaggagggagggagggaggcgggcgggaaagaccaccaggacctcagagccccagagggctgccgggggctagaaccctcagagctaaacccaccagagggcggacctcagagccgcggagggctgccagggtggaccgagctaaagcaccacagggggtgggcagactggagggcatggagcagtctgtgaagggcaggaagtcacggaggagatgctgcgatcggaggattgggagggagctgcgattcgggttcgggcctccagggacacttcgtagagaaccacggcaggaagcggtagaagcagcagggtgcgcctggcgcggagctgtccggtcagtgcagaagagcatcgcccctttattcagcgcctcagccagccagccaggattcattgagcgccttctgtttgccggccgtggggtgtgtccgtgacagtgaggaagggcaagctgggagtggagacgtggcgtggcctccggaggacgggggtctctcagagactgggggaagcggtggtttggagccccgcaccctggccggcctccggaggttgcgggagcggccgtggccgggagggtgagttgcgaagggagaggcatcgtccttcagaagagcaggagccggggagccggagggggccagcgcgggggatgggggcggtgctgagggggggccctgcctcccgggagggtccgaacccgaggaggtggagtcacggccaccgagcattcagaggcaacgcaggctgcaggttccccccgctctggtgggctccaactcgagatgcctcgcccagggcacccggcgcggggttgctcctgtgcaccagccattcccaagctcacacaccggaaccttgcaaggcagcggcaccgggcgaggctctgggcgtctcacgtgtctttggcagctgtaggcgctgtgtttgtagctcagtgttgctctccgagaaactaaaagaccttcagtgaccacgctgcctcctcgaggcccgcaccccctctgggtaggggggctggggagcgcctgtggcacctgatgctgtgcagagtatcagtcaggcaggcgcggctctagtccaaggcgcctaggcttcctcatctcctgaaaggaatgtatcacacacacacacagacacacacacacacacacacagacacacacacaccagtgaagaggccctgcgtctagtcccagtcctgactttacaagctcaggtagtgaggcctgttagggactgaatgttatccccgacagagatgtgctggcagtcctaacccctagcagtccagagggtgaccttgcttggagacggatggttgcagatgcgatgggttaagatgcggtcccactggagcaggtgggactgacacaggaggtaaggtgatggtctggacacagctgcaccgagaggagacagtgagagcatgcccaggagggtgacgcctgtggaggcagggcagggtgaagtgatgcgtgccagggtgaggcaagggtttccagccgctaccagaggctgcgagaaaggcccagcagagattgtcccgggagccctcaggaggagcgcactctccaacactggaggccgcaagaggcagggaggttccgctccgtggatatgagagggaccagggccctgcccaccttgatcgggacttcccgactccggctctgtcagtgcgtttctatcgtgctgtaccctccagtacttagttaagcggccctagcaagtaaatccagtgcctttgacagtccaggggttgaaaacagttacacttggtctgcggggttagatctcagcgcccttgcttaatgctctttctactcatttcacatcagcatctcatatttaatttttaacaaaagtattcttttaagtttctttattcaccttgaacaaagctttcattctctttgaaagttagaaaagtataatacaaccacttaacaaattctaggtaaatcttagaaccaacttgttctttttgaggcctcagagatggagcccagcctctgtgtttaggtaggctggccctcacgtcaccatttccttatcgcagaccctgccctgatgctattaagtagaagtaaaatttcacattggaaaaaaaaagcaatatgaatatcacctgcagagattttaaaatttaacctttgaaatgatgtcagatggctgttcttcaaacaaaacttgtagaattattatagatagatttttccaaatattttaatcatttttactttcttatgtgctataaaaagcgccttgtggattattggctgaattatgtggattaagattacatgcaggtgtaaaggtgaggaataaggaaatgtaatcatgaatcattactcctgtaatagtttaaaacagccctgctctcatcactggagagggaaatggcagcccactccagtgttcttgcctggagaatcccagggacgggggagcctggtgggctgccgtctgtggggtcgcacagagtcggacacgactgaagcaacttagcagcagcagctctcatcacactttttttttttttaatttttactgacagttcatactgtaagtcactcatgtggtcctctccttctcctggcctcacctccctagatcttgcttctcttttcacacctgggacaaagaagcctttccatcaaccctcctgggactatcccggccccctctgacctcccgcttttgcggtcccgtgaggtttcaatcagggccgctcagtagcacttccactgtcctgttccttcctgtgcgcatgcctgggccactcgggagagacggcattcacggcgcggggaaagcccgtcttctcagcagctcctcggaaccaaggccgatgtcacggctctcgcctgccccttgaggcctctgcctctgcctcggctcagtcagtgccgtcggtggccgccacgggagggcgcgctcgagtctggggtgggggcggggatccctgtgctgccattgctaagaggacccgtgccgggagctctttccagcttggcttttttaaaggaagcattgtctacttttaaattaaattctaaaattttctgcatcttttatttatttaaattttatttttactagtgtcaaaggaaaacattttctttaatttataaagtaacataccttttatttgttctgtaaatggtattaatagttgaaacactataatcaaatccatttagcagtaaacttcctaaccagaaagtatctcacacatgtttattgtctcttttaattaactctctgcctgaacactttgtaaatggaaaagtttcctcttggcagtggagtccactccctgccttgatttcagccagcactgtaatttttctgtagccatctcctgtcatttctttcccagtcatttccagcctggagtgacagttatgtcctcttcgcggtttaaaacattgcttctttttatttcattttaggtctccccttcctcctcagccattatctgtctatctgccggtctgtccatctgtcctaccctagaatttctgtttctctgttttctcgttaaaagcatgttcaacattatactgatgtcaaaatgcactttatttcaaccacaaattgaatatattttgtcttttctggaaaagcttgtaaagcttttcattggaagcctttgggaactagaagtaaagactctcccacgtcacagtgttgtgcctcagagtttgtaccaaagcacaaattggggtcttatgtttgaagggatgttgaagcagctcctgacagccagctctcttccagctcagacagtaaatattgaccatctcagatgtagatatcaatgtaccctttggattataaatgtatcatttgtattactttatgttttataatagtttttaaatctgtatttcattaacataggttgatataccagaataacatattgtcttgttttttatttacattttttaataaaacagactttattttttagaggctttttcagcctgctgcaaaattgagtggaaagtacagcgagcgtcccatacacactcaccctccggcccacagagcccactgtgtggcccgcatccctcaccagagcacacatcaccaacgcccaaacgctggtctttaccctcaggcccttctcgggctggattttcagtgggtgtggccaccactgtagcaggatgcagagtacttccctgccctgaaggccctccctgctccacaggttcagccccgtctctcttctaagccaggaccccactggggaggtggagaggccaggggtggaagagtactgggcgctcagtccctgggggaaagggtctccgtggtttcctcccctgcgcccagcaggaggtcctggcagaggcatctgcagaggcccactgcccagcgcctccgctgcggagacccagcggaagtgcgcggaaggccagcaccagagcgttggcctgggacggcgaccgcagcgcctcagggagtccaggtcaccggctcggccccaggccgctgtggggagggcagtttgcccaggaggcctgtcagcagaagcctttgcttttaggcttcttcagagaaaaagaaccagtagaagatatatatataagagagagagagagataagaggagactccttacaggagtcagcggacacagttatagaggcctggaagccccacaatctgccacctgcgagctgggaaccaggaaagccagtggtataattcagcccaatctgaaggcctgagaagcaggcggctggtgatgtacgtgccaggattccaaggcctgagatcccggagctccagtatcgcgggcaggagaaatggacctcccagctccaggagagaaggagcccgccttctttgcctgtcgtcccatcaggcttcctgcacacaggatgacgccccctccctgctgacgctggatcttctcactcggtccgctgagtccaggactcttctctcccagccgcacactcaagggcacacctggaaataacgttttaccggctgtctgggcatgctttaggccagtcaagttggaaacacaaagttaactgtcctgcccttctccttggctgtcttccagaatggctatgccactttgcatccccaccagcaacgcaggagaatcttgttctgcgtcaatcccagcatcggtggcgtcagtgttttggatttggggcattctcctgtgtcacactgtctttttaatgtttactttttgcctcaaaatcatctatacagctctaggaacagagatatgaagggagaattaatttcctagtcaaattctattccatattcaaaattaatagttgataccccattctggccttctatgaaactaataccttccacgtacttactcctgttccacagttttctcttgccctagaaagcaacgtgacgatggattagggcaccttttatgggcgaagccagcagaattgcaggcatcgctggactcttacccagaactgctcaagcttccgtgtccctgtgttgctaccaaaggagaatgtacacagtcctgcagggtgacgggggccgtgctcgctggcacagggagaggaaggtggtgatccctgcctcccagctgcttagttccccgtttctccgtgcaggtgcctccccacctagattcttcttttccttcagttcgcttgcccaggtgctcagtagaagtgtcattaaaatgacaagggtatcggacatgagatgttatattaagatcctgcatttgccttctttgctcctgagaccctattgaaatagcataaacccataggatgcagagaattaggaagaaaattatggcggttttggaagcagggaaacagatgggtgagttataactgacttagcatgtccaggaaagtgaaattcaaaattgatcatggagaaagccaggaaataacccgtaaaatttccaaaagtgtggaaattggcagtgctaggtacttctggaagttggtaggaggagggaaagagttaagactgaaaaatgggaactggttgtgcaaatctccagccttcaggatttgccctctgtggacagtgtagtgaaggaggtctgagccagggccccggggaacttcagtgaccttgaaccgctggccttctttctcaggacattgaagccagtttgtctccctctaggaagagtttgggagaatgttctctgaaggaatctggttagcacaaaagaagaggctcagggatggccagagtgaccttggtcaaccctcagcattcacagacccaccaacccatgcacacacagctggcttcaagacacctttatactttcccactcctataggggagcagggagccccaaacaccacgcatttgaggagagcatcaaaatgaaagcagagatctaaaaaacacaggcaggaaaagaccaatttggaggccacagagcctttgcggcggggagaacacttctcaaagatctaggaaatacataattcaaaggaaaattaattaaaaattaaaatatcataaaaataggtgtctggaatataaaagtggaaaagtgtctcagaaagaagcacaggaaacagaaaataaagaaaattaagaggaccaggccaagagatccaacatctagctaaggtgatttcttaaaaaaaaaaaaaaaaaaaaaaaggatggaataacaaactcaaaatgaagagtagaagggagaaagtcagcaaaaatacaacgagaactttctagttgaacaaaaagaacatgagtttctagattgaaagggcccattacatatgaaaacagatgcaaaccaaggtattaatcatcagtttacagagcaagatgttggggagaagagaacacagatctgagaagggattaggaattgaaatggtttgaggttttccagctggaaaccgagaaactctaaagcagtggtaccaatatcctgagggaagaatattcccaacctagagaattctacctaaccagactgttaactaaagtccgaatctttcaaacagaggttttaaaaaattcatctcgggagcatagagcttttggagggatgtgctccagcaaactgagggtgtggagcaagaaagacgtggctcagggctcagggctctgggagcagggacactggacaggcaggaggcgaagggtgtcctcagaggggcagaccggggcctcgcgagcagcctcctcaggagaaaagccagactgccaggacaggggaggcgtatgtgactgcggcagcactgagttcatcttaagtgtgtccgtgactgtataccgtcggtcacaagtgacgtccggccgctgggagcagtgagaaccctatagcaaagtgaagggccaagccccccgcgaagggcacgcccgtgcagcttcagctgcttgttgccacgcgggaaggctagaccagggttaccagctcctaagatttttatgaaatccacattttcctgaggagcattctcattttgaaataccaggaactgatcaaaaaaattttaaatactgcaagttaaacagttctccagctggatttagctccaagctgccagactgcagcctctttcattctagaagtttctgtcgtttgcatcacagtgagtttgtgaggacagaagcctccagactttccaacttgttgactagcacaaccgacagactccctagagtacggtgactgtccgcctcagacatggcggctgcctgattctgtgtccacagggatggagaggcctcacacattctgctacccagcgtttatccagcagcccgggcttccctggtggctcagacagtaaggaatccgcctgtggtgcgggagaccagggatcgatccctgggtctggaagatgctctggagaagggcatggcaacccactccagtaccacggacagaggagcctggctgcagtccatgggatcgcaaagtgtcggacatgactgactctgttcagttcagtcgctgaatcgtgtccaactctttgcgaccccatggactgcagcacaccaggcttccctgtccatcaccaactgccggagtttactcagactcacatccatcgagttggtgatgccatccaaccatctcaccctctgtcatccccttttcctcccgccttcaatctttcccagcatcagggtcttttccaatgagtcagttcttcccatcaggtggccaaagtattggagtttcagcttcagcattagtccttccaatgaacactcaggactgatctccttcagaatggactggttggatctccttgcagtccaagggactctcaagagtcttctccaacaccacagttcaaaagcatcaattcttcagcactaagctttctttatagtccaactctcacatccatacatgaccacaggaaaaaccatagccttgactagacagactgagtgattaagcacacagatatatacataacaaagcaaacgtaaaggcaggcagttataaactacaggaaagaaaagcggctatagaagaaagaagagtaattacaatatactataaaaatgaaaacaaaaaattgttctaaccaaaaacttagatataacttcatgagggtgagatgagtaatgtgggtatgggtggaggatttagtttcagggctggggtgtagttgcacatggcaagttgccaggcacattatttgtgcttatgacttaaaaaaaattagaaatagtagtttttagcccatcttgttaccttgggaaggtatatctaaatatgaaattaaataatttgaatatctttcacttcaaaatttttcagttataagtacagttaacttcgacttatatgtaagttaacggtccccattatttttttgtttgttactatggagaaactctttaaaccagctcccatagaaccattccagaatagttgtaggccatttaaaggtagaggcagccaagtcagttctgcttcaggtgaaaattaaaagtgaaagttgctcaattgtgtctgactttttgagaccccatggactgactatacagtccatggaattctccatgccaggatactggagtgggtagcctttcccttctcttggggatcttcccaagccaaggttcaaacccaggtctctctcatcgcaggcaggttttttaccagctgagccacaagggaagcccgagaatactggagcgggtagcctatcccttttccaggggatcttctcaacccaggaattgaaccggggtctcctgcattgcaggcgaattctttaccagctgagccaccagggtgaaggaagtcctgtttgtttagcaacagataagccaggtggggaagcacacgacctcacatccctgccattctgttggaagccctgcaggtagggtaagcactgtttataaagagagggatacaggtttagtgaagttaggctgcttgcctagattcacacacagtaaatgaccagccaccattctgatgtagctctaatctagatcatccaatttcagattccataggttttcctagataccactcacctttgtcttagcactctgtaaggaagcgcttcagtgtgtggcttcgggcctttttcttaaagcatgtgcatccttgcgtgcatgtgcaaacatttagagaacgttagcacctgtccttccgaaactgtttcaaaaacctgcagaagagggaatgctcccaagctcactctatgagaccaccctcaccttgacaccagaaccagagaaaggtctcaccaaaaactacaagccagtatcactgatgaacacagaggcaagagtgtgcaacagagccccggcagaccaatctaacagtgagttagaaggaccgtgccccatgatcaaaagggatttatcccagggatacaaggattttccaatatctgaaaatcagtccatgcaatatataccacatccatgaattgaagaataaaaagcatgtgatcatctcagtaaagcgcatacgtccttggctgcgatcacaggtacgtagcaaagcttaatctttctttctttttcattctttggcttgtgtcattgtcctgctctggctgaattaaccctggagaaggaacactgtggtggatgagtttttcaggttaagaaaaagtttactataaagatcaaaactaaattttcatcctatcagatttctactattcatgctaaaagcttgcatttttctcttttacatatgctaaattggcttcagttattcaacacttctggcacataatcacaaacgaaaaatgctctggaaatacaagttttcattagtaaattggagatgtcattatctgaaagcaggggccaagacggaggggaaacttatctctgcccatttgggttttactctgggattcttttaacaaaagttaacagacagacaagaaagttgattaacgcatatagctcacatgtatacaggagatacccaggggataatgagcgaccctcaaagagatggctttggatttcaggattaaataccaatttaatagagacgggagaggggagtgtagccctcttaggggagagtaaatgaattttaggacagatgaagggaccctgagaaaaataaatggaaggtatctttgtgacaaagtttgtctggaggcacttgtgacagctgagttccttttcgagcatttatggcagttagtggtaagaggagttcagagaaagcttcttcctgcacttgctgattccaactgcctacagctcaaaataatcaatgtaccagagtggcctactgtggggtggcacgtcctgaactacctacagccatacttcagggtagcatgttctgccacctttcagagttcagactcactctccaccatgtccctagtgctgctgcccgggccgggagttagtaactgctgaggacctgaggaagcgttggttacattcagtgatggatgggtgggtggatggatgggaggaatgggaggaagagccttagtgccctcatttgttatgcaagaagaacgttaatacgttatttagcacccttattttataaagtgtatttgtatttgtaaaacatattgtataacttctcatagtttcaaaagttttctcaagttgtaataacatacgactgttgccctggttcctccaaacgagtgcccgtgtcaagatgctttacagactgggtcatgctgatattgcaagctatttacacttcctgtgggcttccctggtagcccagctggtaaagaatctgcctgcaatgcaggagaccccaatttgattcctgggttgggaagatcccatggaaaaaggatagactacccaggattctaaaggatagactccagtattcctgggcttctctggtggctcagatggtaaagaatccgcctgccatgcgggagacctgggttcgatccctgggttggaaagatcctctagagaagggaaaggctacccactctagtgtttttgcctggagaatcccgtgaagagaggagcctggtgggctgcagaccaccgggtcgcaaagagttggacatgactgagcgacgaagcacagcaccgcacacaagagtactaatgtcaggtgacttttctgttttcagtgcttatttgcatcggttgtcatttgattttcaaaacaatggcctttcaaaataaaaccctgactcttccactagacttttgaattgcaaatcttggttcagcaccaaatcaccgtgtgatcgagacaggtgatttaacctctccaaggatcagttccctcatctgtagacagagataataactgtacccttgtcgttagattgccgtgggaatcacatacaggtgaggtttttggactagagcctaatgaagaaggcatcagcaggccactcttgccttagaggtgatggcagtcacagctccctgcgttaggcatcggccctgctgtgctttcgctttcttcaaggggggacggcatttttttcctctctgcttcccctcccaacatagggccagtcatggatgaggtactcaacagatgactgttggaatgagtgaggtaggcaggtaaatttcttttaaatcagaaagttgttctctaaatgactaaacttgagctcagagaggttgctcgcagcaacttttgagcagctgctataaatcagtcgtttagattatgtcatttactctccaggcagtgttaccggaggtcccaggaggagagccccctctttgaatcctgagcccagaaccatttccattaaactctcctgcctgtctcacaaaatacacaagaattcttctagggtcagtgactaatatataatcattatagcatttgggaaaataatttaatatgagttatgaaacgaatcaattatccaagttttatttgtttgatcacaaaaaaaactatacgtgaaaatgttatactattctaaatatcctaggtttttgaattctaagtatgaatatgataaaatgaacaactaaggaaagaatagtttgaacagatacagaaagggtaggataagtgagtactttacaaatgaaagtagatgtatgaaattacaagctgtcaggtcagcagtggagatgaagatgataaagtggttcctcccatatattataattattcattttgcccggccctgtctcctttctccgtaatgctcatggagcgggggaggggtgggaagctgtctcaaggaatgatgtttcccacagaagggagaaagggagtctaggaaccaaggctatttctgatcataaaacatcgttctgtgacttgtattgtttctggtgaattacagttgttttcctgtggaatatttttcaactaaccattctgattaataaaaaggattcagttgcaaccacaggaagttgcagctgtaaagtttgttcacagtcctgctgcggaggccgtcagcctggctcccgaaaccagcggtgacagcagtggcagatgggcggccaaggaatggagcggttcacacagaccagccggaaaaggctgcttgataacgcggccatagttaggctggtttgggggaaaagcctgaatgttggtctaaggaagagaggcttctttctccgtgatgattttgacacttttcctccaggaaaatgctgcatagatatctttgctaaatccctcgttacctttagaaaaataatttgaagaaattatagtctctttaattttgaactgtgtaatatttatatatacagaaaataaatgaaacatataagttgcgaagtataataatcatggtaaataatattttatgggaattttaaactggtcctttcccattcataagacttttgctcctatttccaagcagcaaagtagagacatttaaatacagccatataaatggcaggaagcgttcgtgctcctcgtttatgttgcagacacacacacacatctcggctccttcagtccagcgccgccttgaggctggggcccgtgcgctggatcgtgcgcgcagcccagtgtgcggcttcggaggccgcccggcaaggagcccttctcccagcttccctttatccagatcagctgagttactgatttaccttctttgaacctaagttgttattttgtttctcttactggtccagatacttgaaacaggattgcctctcaattactttttcccttctatttagtgatctccagtaactaccagacctgtctcggccttctgatgcattacccactcatcggggacgttcactcactgattcttaaggctctgttccttcgtgacccaaaggtaagcttcccaagtgggacgtgcacagtgttaaatgggatgaaaaattggcatctcctcatgactctaaggattcgtaatgtaaaatttgcctaatggcagatgaatcacctgctgaaaatttgcctaagagtcgtaggccaaaactcccatgcctgatgggctagcagctcagcgggcaaacagaggacactggctgagaggtgggagcgtgctctgttgtcactcagaagggcctcctgcccgcctgctcccgtgggagcccaggacgtggctgagtgcccgcgtctgctgggaaccgtacttggtgaccatcagcttcctgtacgggtccaaaactgacccaggtagagccttgaggaccacatgaagaccaagacattagagctctaaaaaaaacccctgttttctaagagtttataatgtaatgcaatactaagttatttcatattatgaatgtatatttattttgtgggttaagagtaacctaataaagtaaagatctaaagagtatttaatactgacttctctatttgaacttaagtcaccaaaattttctttatactccagagaaaaagtgggttcttttacaactaatgttatatttcttgaaaataagaacattaagtgatctaaaaaaaaaaaaaaacaactgtgaatccttgatgcttcagagccaaagagaaatactggatggagcctgagagaggaagcgtgggacaggaggccgcgggtgccaggcagccggtggtaaccccgcccttggctatctggcagggcccctgcagtcgtactggccgtggtgcacccgtctctgagtcagtctgtgtgtgggtccactgccagggctctgtctgatggatgtggacctccaagtccaacgtgatcctgattctgagagatttctgttcttgcctcagttgttgacttcagcctttgagcgtatcttatatttattttttgcatggttttaaatttttttttttcttttttttttttcagaaaaaaaatccattttctcagaaatgcacaatttttatatcatttctcctgcacagaatttcattatgtatcagaaacataatccatcatttctctgatacataaggtagcttatcttttttctggtaaggtttaggattcagactatgaaaaacataaagtcccatattttttatgtgtatgtaggctgtagaagtatatatttttactataaatagccaagattagtgccatatctataaagggagtaaacaatgaagttgctggtcagtgaggtatctgagttttgatctacagacttatggtaaattctgtctgctcagcactggtaattattagagtcgtacagagtgggacaaaaattgctaaaatagctatttgaattattcatttgtgtgatttgtttggtttaattgaaaggagaaatgaatctgttatgtaaaccatccatcttaagtttttcctagctaaatatggttgtccttcctatgaactatttacacttagagttgcagaattctgatactaaattcatcagtgttattagcagaatctgtgattttaggatgcttttgatctcaagaaggtctagagggacttcctcttgtggtccagtggataagactgtggtccggtgcagggtgcagggtgttcgggttcagtccctacttaggggactagatccgcagctagggcctggagcagccaaacaaataagtaaatatttaaaaaagaggaaggtagtgtgtgtgtgtgtgtgtgtgtgtgtgttatgtatgtatatacacacatatatagagagagaataatgaaaccagttctacaagcattaaattcttctgtaaggtttaagaggaaaaaaaaatagcataaaaagatatctgaaaaacagtattcctcacttttacattcagtaaaaacaatcaaggttaagtgtccaaaagttaggaccttaatccggtatttctgagacatgagaagctggatagaaggcaggagtcatgttgaaaaggcttttgagaacaaggtcatggcgtggtgacatctgtaagggaaaataaagacagctgcggcattttaagggggttcagatggccagctcagcgaggcaggagtttagctaagtgtatgtaatgctgacccactgcctttatcagtacgtgtcaaatgataactgacatcactcagcactagtgccgattggaggtctgtctcggtgcgcggtcctgggtctagccaggagcctgagctaggaatccagacactggttcaagtcttgactctcctaccaaacatcctgtcatctggtgagatccacgagtcctgagtcttcgtcttctcttgtgttgaattactttgcctctgataacccacccaagcagagcagcctttgatcataaagaactgacttctaatgatgcaataagattgaagacacaagtggaaaaaaaaaaaaaagtttacatatatattctaaaactccccaagcagataggtagttcatgtcaattatgaactcatagaggaggccatggacacttcagttcagttcagttcagttcagttcagtcgtgtccaactccttttgaccccatgaattgcagcatgccaggcctccctgtcagagaaggcaatggcaacccactccagtactcttgcctggaaaatcccatggacagaggagcctcatgggctgcagtccatggggttgctaagagtcagacatgactgagcatcttcactttcacttttcagtttcatgcattggagaaggaaatggcaacccactccagtgttcttgcctggagaatcccagggacgggggagcctggtgggctgctgtctatggggtcgcacagagtgggacacgactggagcgatttagcagcagcaggcttccctgtccatcaccaactcccagagtttacccaaactaacgtgcatcgagtcggtgatgccatctcatcctctcgtccccttctcctcttgcccccaatccctcccagcatcagggtctttaccaatgagtcaactctttgcatgaggtggccaaagtattggagtttcagcttcagcatcagtccttccaatgaacacccaggaatgatctgctgggagggaataaagagaggaggaaaagttgttgctagtaccccaccccatcctctgaaaatccagacatcagagtgctttaaatgtttcctgtgtattagcagcaatgaaacactgaaatcagagtgagtatatccacacaggcagatctctgtaaactagtggaaagaggtttgaagcgcaggagtttgctctccatgtcccagcttcacgaggcagttgttcttagcgctgctgacagacacggtaagacaggaataaacacgcagctccaggcctccctggttccttgtcagccttcagaggagcgcttcctcctctcactagccctcaggcccagtggaggctgctcagctgaggacagactgtagtagggctcgagacactgggctgttacttgttttccatcagatgtaggctttgctgggaaactatgtctcatcctggcagactgagatgatgggcctggaaactgtaaccacaggctcaactcctccatgtctccaagccctttgccatgcttggtttggtcctcactgcaagctccgagtcgggcagagcgggttatctctcctcttgctttttcagtgcagagggattaaggtcatgtggctttccccaggccaagctgcctgcaagcgtgcaaaccaactagagcggttccaggccctgcttccgctcaccccctcctgagagtccgagcatctgctctcccttctccaggaagccgttccaggctcagataagcaggtgttttccctttgagtgccctcagcaccttagtttagtgatttgcttaatcgctgaatcataggttagcgatttgcttgtgtcttttatcagatatctctcctcatgatcctctcatttgatagctttagccttggtcctgcagtgttgctcttaagaaaacaatggtaaattgaatgctgactaatctgggtggatctcactcacctcacctgttttcacctcccttcaccatatccgcgttccacagaagccgtggtcagtggtagatttgtccgctgccatctttatcaagacagtgaagagaccctagagtttgaaggtaaagggcatccagttccttagtttgctatcagacagaattatttgaaaacctgttactcccctcaaataccatggaacaaagcagactcaacatcaatccagtcagtatacttcacttagactgtgagaatcccagaactgcaaagaaccgagagagtctgacgcacctcctcctcctgtgtgagcaaactgaggatgagagtggagctgagagtgtgcgcaaggccgcgccgcttgtcagcagcagatcgaggggcagaacccaggtctttcagcctccttccagcctgagagatgtacctggtattagttttaaaaatggtagagtcttagctactgatacttctcgtatagattcttttatttatagtagtaggtatctatctgcccctgtagtaagtgaaacggacgtgtttgtaagtgacccaggaacgacttgcagtgttgttaagtgtgtgaagagactgggtatcagtgtctgcagagccctctcctctgttcaccgtgcagtgtggtttctatacttgctcttcagaccacactctggatgcttggtttcctgtcttttgttatgttagaatcactgagcagatttccaaaagcaatccactaaatgaagtagggggatggaaggagggcagtctgaaaaatatgaagggattaaaaaacattgttctaactagttgttcaaattccaaaaaaatttaaaaacccaattagaaacaaaagtcatagagaatgtgaacatattgtgttccttaaataaccagatgttctttccttcctgaaggcagtaagggctcggaataaaaggtttaaaactattgttttaagttaactgtgaattttgcaaatctgcttttacccttcagcaaataaaattctaatatggaaacataagcaaagtgattttcatttttcggtcctctcttacttgtgtcgcatgttgagtgctaaccttatcacaaagacttattgcaaatgaaatacagtgcattgattaacactgaagatgattcagtaagagtttgacagccaccgattgaagactagaatattgtccaaaaattatttccggtaagtttgcaagcatctcttttagcagtgactgttactgtttatgggagaaaactgctagaaataaggtaacttaattctgtagtcattcttgtacacaaaaacatcctataaaacatagtgtacaatgttcttgcgcttggccagttctgatttggcttttgtttagatttatgttagactttgcttttttaaattataaaatccaaatactcagattttatgccagtaatagatttttatttttttaattccaaaaccctcactgtacatgcaacttttttttttactgtcaaatgtcattttactaaaatgtcatatatcagaattgaaatgataagtggattcaagtctggtgatgatgatagaagatgcttcactctggcaaagccattataatgtcttcttctctgaacgaggaaggacctaaaaccacacacactgactctttgagagtgcacattgtccatttatctacttttcctgatgttcttgttgaaggttctgttcagatttcccaggatgtgtgattttgttatagaaagaatgtgttacttctggtttcgtcatcctttttcccctctaagagctgaagcagttccctgaaatcgttcttgaagagtcatatttctgtgtgttttctctcttagtgaccaaaagcaggtgttttttcctttgtatctatacatgactctatattgttctttttatcactagattttaaccagctgaatgattattatagctaatatttaggcattggtgatgcctcagttatattttcatattcaatcagaaatagagactttttgagatagactaaccttaaaaacctcaagttttacttctgagtaaatagtggttttcaaaaatctataaaagagtaatcaaaatatctttattgaaccagtatttgaagtttgttatttattatgttcagacatttcataaagcagaattacgtgttcctcaaaacttcttaagggtttcctagggcctttaattttggactcgttctataaagtgtttcgagtttgttactcaggagatctttactgtgcgttaccctgcactggcactgcttagctgctggtgatgttaaaggtggaccgaaaaatggcccttaccataataaacaagcaaagagaaagtactcagttcgtcacgtgttacaaaaggtgcggataggatgtcatccttaaagtgagaagggaggaagaatctgatctcaatgaagacctccatgggttggtctaaaggctctctctcaggaggcaccatttcaggtgagaactgttggaggagaaggaactaggcagccacagagtcgggaaaggagcctccaaggaagggatagcaaacacacactccaaaggcggaaggagcttgggctgttagtggagccagcggaccagcaagctgtcggggccctgcctgagcccggatgggcctgcgaggctgcgtgaggtcgcagcttgaagctccagaaagatgctggattccgaatggctctgcctgatgggtaagacatcttatcataaacgactcttgctctcaggcagaagtgccaaaaactcttcttaaaggagctcctcataccttggtaaaacacgttcatttattcagacctccaggaaaacacacccatttattcaaacctctagactgaaaaggcaaaatgataggaaaccaaaagaggaactccccaggtcagtaggtgcccaatatgctactggaaatcagtggagaaataactccagaaagaatgaagggatggagccaaaacaaaaacaatacccagttgtggatgtgactggtgatagaatcaaggtccagtgctgtaaagagcaatattgcataggaacctggaatgttaggtccatgaatcaaggcaaattggaagtagtcaaactggacatggcaagagtaaacgtcaacattctaggaatccgcaaactaaaatggactggaatgggtgaatttaactcagatgaccattatatctactactgtgggcaggaatccctcagaagaaatggaatagccatcatggtcaacaaaagagtctgaaatacagtacttggatgcaatctcaaaaccaacagaatgatctctgatcatttccaaggcaaaccattcaatatcacagtaatccaagtctatgccccaaccagtaatgctgaagaagctgaagttgaacggttctatgaagatgtacaagacctcttagaactaacaccccaaaaagatggccttttcattataggtgactggaatgcaaaagtaggaagtcaagaaacacctggggtaacaggcaaatttgatcttggaatacaggatgaagcagggcaaaggctaataaagttttgcccagagaacgcactggtcatagcaaataccctcttccaacaacacaagagaagactctacacatggacatcaccagatagtcaacaccgaaatcagattgattatattctttgcaaccaaagatggagaagctctatacagacagcaaaaacaagaccaggagctgaccgtggctcagatcatgaactcctttatgccaaattcagacttaaattgaagacagtagggaaaaccactacaccattcaggtatgacctaaataaaattccttatgattatacagtggaaatgagaaagatttaagggactagatctgatagatagagtgcctgatgaactatggactaagattcatgacattgtacaggagacagggatcaagaccatccccatggaaaagaaatgcaaaaaagcaaaatggctgtctggggaggccttacaaatagctgtgaaaagaagagaagtgaaaagcaaaggagaaaaggaaagataagcatctgaatgcagagttccaaagaatagcaaggagagataagaaagccttcctcagcgatcaatgcaaagaaatagaggaaaacaacagaatggggaagactggagatctcttcaagaaaattagagacagcacgggaacatttcatgcaaagatgggctcgataaaggacagaaatggtctggacctaacagaagcagaagatataaagaagaggtggcaagtatagacagaagaactgtacaaaaaagatcttcatgacccagataatcatgatgtgatcattcacctagagccagacatcctggaatgaaaagtcaagtgggccttagaaagcatcactatgaacaaagctagtggaggtgattaaattccagttgagctatttcaaatcctggaagatgatgctgtgaaagtgctgcattcaatatgccagcaagtttagaaaactcagcagtggccacaggactggaaaaggtcagttttcattccaatcccaaagaaaggcaatgccaaagattgctcaaactaccgcacaattgtactcatctcacatgctagtaaagtaatgctcaaaattctccaagccaggcttcagcaatacgtgaaccgtgaacttccagatgttcaagctggttttagaaaaggcagaggaaccagagatcaaattgccaacatccgctggatcatggaaaaagcaagagagttccagaaaaacatctatttctgctttattgactatgccaaagcctttgactgtgtggatctcaataaactttggaaaattctgaaagagatgggaatatcagaccacctgacctgcctcttgagaaacctatgtgcagtcaggaagcaacagttagaactggacatggaacaacagactggttccaaataggaaaaggagtgcgtcaaggctgtatattgtcaccctgcttatttaacttctatgcagagtacatcatgagaaacgctgggctggaggaagcacaagctggaatcaagattgctgggagaaatatcaataacctcagatatgcagatgacatcacccttatggcagaaagtgaagaggagctaaaaagcctcttgatgaaagtgaaagaggagagtgaaaaagttggcttaaagctcaacattcagaaaacaaagatcatggcatctggtcccatcacttcatgggaaatagatggggaaacagtggaaacagtgtcagactttattttgggggggctccaaaatcactgcagatggtgactgcagccatgaaattaaaagacacttactccttggaaggaaagttatgaccaacctagatagcatgttaaaaagcagagacattacttcgtcaacaaaggtccatctagtcaaggctatggtttttccagtggtcatgtatggatgtgagagttggattgtgaagaaagctgagcgctgaagaattgatgcttttgaactgcagtgttggagaagactcttgagagtcccttggactgcaaggagatccaaccagtccattctaaaggagatcagccctgggtgctctttggaaggactgatgctaaaggtgaaactccaatactttggccacttcatgggaagagttgattcattggaaaagactctgatgctgggagggattgggggcaggacgaaaaggggacgacagaggatgagatggctggatggcatcatcgagtcaatggacacgagtttgagtgaactccgggagttggtgatggacagggcggcctggcaagctgcaattcatggggtcacaaagagtcagacaggactgagcaactgaactgaactgaactagaatgtcacatgagtctgatcagtagattccagtttgatttaagaagactgaagccagcactgtgaacgcttttggtcatacacatattattgttatctcttaaaaaactgccttgactgccttctgtatgccaccagtctcaggcagttttgcttccatttacgtcagcattgtgctcaccaaatagtgttaagggaactagacccatctttcttacctaccaaacaagagctctgcaaggtcagggaccagatctccaatagcattaatcctgggtcagcctctgaaggaatctcaaaatccaggtttcgcctctgtcacagtctgctgcctttatgggcaggtcacccttttcttggacaaagaggctgggtcacataattttaaaggacatttttgatatgttttagtaggatgcatttcacctcagcagatcctccctctttaaaaaaaaaaaaagaaactatctgtatagaggatgagtgttggtccatgtgattgggacacagtccattacaggtgtgaacaactgatttgaaagatcaaatgaatgagcatattgtagaaagaacagctgattcggtcttacagagtcaaaaaaatcttccatatgggctttgaacaattttcttgggacattattccatcttaagaaaacagtgtaaacagagttcctgagaagggctgaagcaagtagccaggccacgcctggcagttctctagcgacagtcattcgtggacccctcagggacctcccgtcaacacatatatattagcagacactaattttttttattaaactataaatgatttgcaatatattgttagtatcaggtgtatggcccagggacttggttgtacatttatatgtacatatatattccttttcagattcctttcctttataggtgattataaaatattgattatagttctctgtgctatgctcagtattggttatctattttatacttagtactgaacatgttaatcccaacctcctaatttaaccctctgcacaattgcactcatctcagattctagcaaagtaatattcaaacttctccaagttaggcttcaacagtatgtgaaccgagaacttccagatgttcaagctggattgagaaaaggcagaggaaccagaaatcaaattgccagcatccgttggatcatagaaaaagcaagagagttccagaaaaacagctacttctgcttcattgactatatataaacctttgactgtggatcgcaacaaactgtagaaaattcttaaagaaatgacaataccagaccgccttacctgccttctgagaaatctgtatgcaggtcaagaagcaacagttagaaccagatatggaacaatggattggttctaaattgagaaaggaacatgtcaaggctgtatattgtcactctgcttatttaacttctatgcagaatacatcatgagaaaccctgggctggaagaagcacaagctggaattgattgccaggagaagtatcagtaaccttagatatgcagatgacaccacccttatggcagaaagtgaagaactgaagagcctcttgatgagagtgaaaaagctggcttaaagctcaacattcaaaaaacgaagatcatggcatccagtcttatcacttcatggcaaatagatggggaaaacagtgactgactttgtatttttgggctccagaatcactgcagatggtgactgcagcttggaagaaaagctgtgacaaacctagacatattaagcagagccattactttgctgactaagatccgtctactcaaggctacggtttctccagtggtcatgtatggatgtgagagttggtctataaagaaagctgagtgccgaagaattgatgcttttgaactgtggtgttggagaagactcttgcgagtcccttggactgcaacagatccaaccagtccatcctaaaggagaccagtcctgaatattcactggaaggacagatggctgaagctaaaactccaatactttggccacttgatgtgaagagctgacccacttgaaaagaccctgatgctgggaaagattgaaggcaggagaagtgggtgacagaggatgagatggttggatggcatcaccgactcgatggacgtgagtttgagcaacctctgggagttggtgatggacaggaggcctggcgtgctgcagtccatggggtcacagagagttggacacgactgagcgtctgaactgaactgaacaactcctttttgctttccccttcggtaaccttaggtttattttctttgtctgtgagtctctgctttggaagtgtgttcatgtgtataagttttagattccacatatcagcaataccgtgtttgcctctccgtgtcttgcctcacatagtgtggtcgtccgtaggtccacgcacggtcctgcgaggggcgtgtttccgtcttttcatggctgagtgctattctgtagcgtatgtgttctgcacctgctttatccattcatctttgaacacatttaggttgttcccatgccttgatccttatacagagtgctgctgtggacattggagtccgtgtttctgttcagattccagctttctccgagtgtatgcccaggagtgggactgcaggatcccacgggagctctatttttagttttttaaggaaacttcctgctgttttctctagtggctataccaatttacattcccaccaacagtatggaagagttcctttttctccatactcttctccagagtttgttatttgtagactttctgatgatgcctattcttaccagtgtaaggtgatacctccttgtagttttgatacccatttctctgacatttagcagtgttgagcatcttttcgtgtgcctcttggctctctggatgccttctttggagaaatacctatttagatctgcccgttagttgatcgagttgtttagtcttttgatgttgacctctgtgagctgtttgtatattttgcagattaattccttacaggttgcatggtttgcaagtattttctttcgttctgcagactgtcatttattttgtttgtggttctctttgctgtgcagaagctttcaagttaattaggttccgtttgtttatttctgttcttctttgcattactctaggagatggatccaaaaacctattgctgtagtttccatcaaagagtgttctacctatgttctcctctaggagttttacagtatccagtcttacggtctttagtccgttttgagtttctttgtgtgcattgcgaacgtcctaattccacttagttttacaggtagtctagttttccaagtgcctcttattggagagactgtcttttctctattgtctactcttgcctcctttgtcatagattaattgacctaggtttatgggcttatctctggaccttctgtccttttccactaataggtatttgtttttgtgccagcaccatgctgttttgcttactgcagctttagagtatggtcggaatttaaggaacctgattccttcagctccattttctttctcaagattgctttgggtgtttgagggtttttgtttccataacaaattttaaaattttgggttatagttctgtgacaaatgccattggtaatttggttgggattgccttgaatctataggttgcattgggcagtacagtcatttggaaaaggttgattcttacaatccaagcattggtgtatctttccatctgtttctgtcatgtttgacttctttcatcagtgtcttacagtcttctgcctcctgaaggaggtttattccttagtattttattctttttgatgtgttggtaagtgcaattgtttccgtaacctctggttttgatcattccttgttagtgtatagaaatgcaacataattctctgcctgcagcttaaccagattcattgatgagctggtagttttctgatagtgtctttaggattttctctgtacaatattatatcatctgcaaacagtgacagtcttacttcttcttttcccatttggattccttttttttctcttattgctgtggctagcagcaataagagaatctgcagcttccaaaattaggctgaataaaagtggcaaaactggacacccttgcctggctcctgattttagaggaagtgctttcagccacacaccattgagtgtgatgctggccgtcagtttgtcatacatgactttcattatgttgacgtaggttcccactgtgcacaccttggagactttttatcataaatgttgaaatttatcaataactttttccgtatctattaagatcacatatggttcttattcttcagtttgtcagtgctgttaccatgctaattgatttgtagacactgaaaagtccttgcattcctggggtaaatcccgcctaatcatggtgtatcatccttttaatgtactgttaattgaattgctagtattctgttgagaatttttacatctatgttcatcagtggaattggtctgtagttttctttttttatggaatcttcaggcactaattttttaaaatacatcacatgtgtaggatatcctgtttggtagtagtttattaggcattaatttatataatgtttcaacttctgtgctgttatttaacataagtaaatgtttgtgtttaagtaaaaagttgatgtgaaaagtactttttcccagtgatttttgcaagatttattggctaaagtagtggcttgtaacattggctcaaaataagcaacatgtttgtttatatctttaaagtcactcttgaaaagttcagattttttttttattgtgggtggccaaagagacctgtgaaactctgtggtgaagagtgctctgaatgttttagaggagagagtttctttactgaaaccaattatcatggtgatttattttttctcaaataagtaaagaagagactaaaatccgtggtaaattctattctcattaacagtacacgaaacaaaatctataaaccagttctctgctttatagttgctgttttacaagtaaaggcaaaatggtggcttttacagagacatatttattttataaataaatatttataaacctccttaatagctttcaaagctgttaatcctatgcatgtcagcttagaaaggcagtgaggctgcgaatgtacagtgtgaaagggttacagcatatcgcagggaggtgtctgtgccctgccccatgggcaaggggcagtggccgccctgcctcactgctgacctgccctcccacagtcaaagaaagcatgggacgttgtgcagccttaggtcagattctaggtggactggcaagaccgtaactggcctataatctctagaggtcatttccagttctaagtgcagagaacctaactaatcacttatttttcttcttatatacttcagaaggaaaaggtgctactttgagttctttgtcatcctaatgttatagctgaaaaaattgaaagttataaatcacaaattataacaaaaagacacaataaaaatgaaaactgacactagaaaaaaagagcataattctttttaatctaaatagttgtgaccacagtaaatatgccatttactccttaagtatattaatagtaaacatcttattgggcttcccctaatgccccagtggtaaaaaatcctcctcaacgcaggaggtgtgggtttgatccctgggccacgaaaatctcgtgaaggaggaaatggaagcctactccagtagtcttgcctgaaatttctcatggacagaggagcctggcgggctgtagtccaaagggtcacaaagagttggacacaagtgagcacacaggtatcttatagctgatttaaagtgttaaatgtattgattttatagaagtcaatacactcaagtagttaactgcataatcataattgatttactgttctatttaaataatttgaacacaaacccaaaacaaaaccacaaaatatttcatcatggggagcttttccgtttatttttcccagttcaagcacttctgtggctccatcctgggaaatgagttggtttctgtgctgcagcttggtctgagatgctcgcatgacctggagcggcacctccgcccacccgtgccagaaccccctcacgggccccggcggaggcctgggggctgtggggggcccgactgcatttgccctgtgaatgaggctctcacgtgtcctgagtgactgttcctcagtgtctgctgtgatttggaatgctccttaatttccttgggcgtttttccacgttttgaagaggagcctctggttcatttctccccattgtttccttctccaaaatgctacttttataaattcagccagaactgcccagctcccactgtgtaccagtgatatccaaagttccagaattcaccagacgtcttggttgaaactcgtaaggaaggatgaacaggcagtgtggccagtgaaaggtataaaacccacttgcctggttccccgccctcctgtgagtcctcactgagatgcgtgtcccctcagcgagccctgggcccgtcacccgcagaccgcctgtgccccctcctcacggcccccgcacccggatcacggcagtcaccagcttctgtcacagtcgataatccacttatctgtcatgtcctctgtaaagatttttctgtcttcctctgacagtacatcacctccatgaaggcagtgcttttagtccgctttatattcttatcaaaatactgacgataataaaggaagggaagaaggagggaagaagggtgactgaggaggaactatgggctccatcacagtgacatttagcaggtgctgactgccgcctgcaggtcaggaagcaacagttagaactggacatggaacaacagactggttccaaataggagaaggagtacatcaaggctgtatattgtcaccctgcttatttaacttctatgcagagtacatcatgagaaacgttggactggaagaaacacaagctggaatcaagattgctgggagaaatatcaataaccttagatatgcagatgacaccacgcttatggcagaaagtgaagaggaactaaaagcctcttgatgaaagtgaaagaggagagtggaaaagttggcttaaagctcaacattcagaaaacgaagatcatggcatccggtcccatcacttcatgggaaatagatggggaaacagtggaaacagtgtcagactttatttgggggtctccaaaatcactgcagatggtgactgcagccatgaaattaagacacttactccttggaagaaaagttatgaccaacctagatagtatattcaaaagcagagacattactttgccgagtaaggtccatctagtcaaggctatggtttttcctgtggtcatgtatggatgtgagagtcggactgtgaagaaggctgagcgccgaagaattgatgcttttgaactgtggtgttggagaagactcttgagaatcccttggacttcaaggagatccaaccagtccattctgaaggagatcaaccctgggatttctttggaagtaaagatgctcaagctgaaactccagtactttgccacctcatgcgaagagttgactcattggaaaagactctgatgctgggagggattgggggcaggaggagaaggggacgacccaggatgagatggctggatggcatcacggattcgatggacgtgagtctgagtgaactccgggagttggtgatgaacagggaggcctggcgtgctgggattcatggggtcacaaagagttggacccgactgagcgactggactgaactacctgcctcctgtgcccggtcctggggatgcggtgagtcagggagacagggcccagaggccgcaggtaacagtgggtcttcacaggcacaaccaggagcctggtgcccaggcagacccctcacaaccggaacgtgaacagtctgccgcagggtccggaagtctctgtaactgttctgagatcgcctggtctcagatgatacttgaagaaataaacatgagattgagagaaaagctgctgcccaacctgaaagccaaacacaggctgagaaccagtgctttcagaaatgagtgcttgtgcgtgcagtgcctacgcaggagcgtcagaggatcccgggaggaaaggagcggagcttctgtttattcgcatctttctgcaaaagaaatagaaaccgagctttgcattagcactgtggccttcaggcaggcctggtgtcactggtctcccatcacctgtcgggcctcctgagggggaggccctcctcacaagggcacggactgacccctgcctgcccttcgctgctccttgtacccagttacggggtcatgcagatgacaggttcttaatgccatatttattccagtgttaaaaagatgctggggccatgaacatctattgtgggtttgccccatatcttctgctaataacagttgtccaacataacttctgtttgaaaagcatacttcaaaattgcttacctctaatgtgatgacaggtaactgtcagtattaaggtaccatgcaaatatttttgaataaacaatttgtctcttcaaggtaatgatgacattttaataatgagtgaaaataaagagctttatcaaagaagttcgtggtattggatgaacagtttcaaactgtgtatttggaagtttcatctatttgtgatggtctagccaaaaacaatttaaacgtatcacttagttacatctctcaaactacactaaaaggtatggaaacaggattttctaacttgctttcaaatcttgtaaatgaagagataaactcaggtttgaacctgttttttttaaagagaggaatgtgacatcttccaggtaaatttaaagcagagctgagtggggcttccctgggggctcggtggcaaggaatccgcttgccagtacaggagaccggtttcggtccttgacccgggagggtcccacgtgccctggagctactgagccttgccctggaaccaggagctgcgctgctcaggccgcgcacggcaagagaagccgctgcagcgaggagcctgcgcgccagcagcgggagagcggccccacgtgcctcagccggagggaaggcgcgtgcagcagcggagaccagcacagccagaaataagattaaagaaaaaggagagctgggtgacgactaatgctgggtgtcgacttgactgggatgcagagacagctggtcagacacccgttctgtgtcggtgaggttgttcctggaagcgctgagccctggatcgctagaccaggccaagaagattctccccaacagtgcacacaggagcatgcaggcccttggggggccccaggagaagaaaataccgaggaagggcatccttgagccaggacgcccttctcctgcccgcacacccgagcacctggttcgtggccctccggcatctgacccaccatcgttcccctccaacctcccgtgactctctccttgcttacgtgtcccccttcttagaccttggcacgtggactgcatcacaccactggtgttcctggttctgaagtctcccagtggtctccccttcttagaccttggggcgtggactgcatcacaccactggtgttcctggttctgaagtctcccagtggtctgtttcagcatatttcacctcataatcacatgagccaataatgaaaccttctcttctatatctgtgtgtaccagttggttctttttctctggagtaccctgactaatacaagctgattaattttaaagaagacagaagttttagtagccaaattttaacaaaacccctggcatcattgatgagtaccaaaataaacaccatactttagcaagggcaccaacaacggccttccttcattcagacccgaatctctttgtgaggtagctttctctggagtgtcaaaaactgttgcaaagcatttaaccaagtcaagaagcgtagtcaatcacattcctaccattgcaaatagatttttaggaagagcaaaaaagctaataaatattctattataaaactaatttaaatatagtgtattttatctcatttaaaaacttttgcatatattttctaatgtacataatagattactgcaagtggtatatgcatatgatttgtaaataaatagtgttacatgtcaggccccctgattttaggtagcaaaagcatcatcaaagttgagagacccctgctctagacaagtgtctccagaaagcagatccagtcaatcctgatgcctggccagttgagagagcaggactggtctgggcacacaggtctgggctcccccacacgtccttgagcagggccgcttggcaggacgcaggcctaccccttgtcctgtgaatgaaggcaccctcctgtgtccctctagttaacctgatgctttgctgaattctggaccgttgaatgccactgacaagcggacctgctccagcttggttctcgtgctttttctcgtaacttggattcgtcatgcactttttctagatgatagctgctgatgaaaaaggacttccattcagttataggaatgctgtgtatcgtgtaatttctttagaggttgttgggacttgggatccagtaattacacctgcatctactcctgaggccgggtgagggtgggatgagatgtccaggccactcacggccccgcgcgtagccaacgcagtgcccacggccccctccactgcctcgcccacctcgcaggtttctgggacggactctcaccattcccacactccccatttccttttcttcctgaggggaacttgtttccttgaatcttcgtttgttcatggtctaaatactgagttggaaaattggtctgttgttaattggtttgccaaatccagcctctaggttcagaaagtattaaacccagtgagatggatggggaaagtatataaaaataataataattactgttctatagtgagactgacctttgttttctttcatcaaccatacatcagcagcggctgctgcccaagtgggggacagtaacgtagggatgaaagtaaaccatcaggagtgcagactcccaggcgagacgccgagggcgcggggcgtgcacacaccggctgttggtgagtgagaaccaaggagcagaatgaagaagtcacggggacagccttccttcttgcgctgctttctgagagtgccgtgtgcacctgccttggtggtcatgctgctttgttgtgggagcgtgttagattacagtgttaccgtcagttaccgtgacaaacgaacccgtgttcccatgctttaacacagtaggtttgtagctttcacacaagtgacaatccactttaggtcaagggtgaggctatctcaggatcacccagttcttggggcgtctgccagctctgctgttttcagctttgaccttccagggttgtccagcacattgacctcccgacagatgagaggactagttgattactgaaccaaatgcttgcctgctcagcacggctgaactaccggcagcaggctgtggtgaagaacacgcagcactcactgcagggcactgagcaaggaggatgggcagcccatgcccagatccccttgatgcttcagaccacgtgatggctttcagggagaggctttaaagacagggtgaggctgggcggcagggtgtagggtcatcttaagcacagttctctgactggcattaaggcgaggtttcaagcagcaccaaccttccggtttcagccagcctagagtctgtgtgcttctggtcagttttccccctggaggagctctgcttcctgtgaaagcaacttaggcatgtgtgccagggttgcatttgcgtctttcagggagctgtaggtcccctgactctgctgttgttgccagttccccaccctaagagctgctctttatgtcttcacattccatcatttactgtttgtgtcagccttttgagactcaaggcaggcctgggagactaaagacctgttgcttccaaggtcaaggacacggatcccttgagcataggacaccactgtatatggtttcagttccacctcttctttgctgctcctcagtcctgagagcaggtttagggaaagaaagggagcacagctttgggtagagaggctaattgaaaaatcggcagaggaactcagtttcaggggacgtggtctcaagagctttttcccagacgttggcgatcttagctcttttgagagccccttgggtttctcctctgcggtgcttctttaaagcgaaatgaggagagatgagtcgatgctgttgcgtggaacggtaagccctgcatctgaccgtcgtcgagtcataggtggcgttggtagtgatttgattctttctggccttttttggggagcttcccaggtggtactagtggtaaagaacctgcctgccaatgcacatgagatgtaagagacgcaggttccctatccctgggtcgggaagatcccctggaggagggcatggcaacccactccagtactcctacctggagaatcccatggacagaggagcctggcgggctacagtccagggggccacaaagagttggacatgactgaagcaattcagcgccatgcacgacctgttcttgaagtccctcttgtgacagaagtgctgattctccactcccctttctcactacagcagccgaaacagagtacttccgattactgcacttagacgctgtgtgatgcctactcggtttaagctgtctttgtgggaacagcaccaaagtaagaaaatttgcagaaagcagaaaaatgtcaggaatgcttagagttgtttttcatgaactcaggaaagaggtaaaccctttacccttatttttctagccagtatctgaagaaatcctgtcagattttctcataaaggttctaacttaatgtatctgttttacattccactaaagaggacccactgacaagagtgtcagctattaacttgagatccagctacttgatttacttaattggtaacctcttatttaagttctcttgaacatgcttcatttgagtttgagaaactaagtggctaatacatagggaacaatgtttgaaatagcgccgaacagaaaccagaacttcagagtatagttagggcttaaagtaagcattcaaaagcagctgacttccaatcaaacacgggagaagtgatttcattatcacagagatagaacagtttgatggcctaaagagtttcactgaagggtttaatatttgtgtgtgtgtgtatttaaaattacagtcattttataccaaccactgttttttttaaataggaaaacaatagaacatagataatatatctgtatttttcatttcttccttccttttttaaaaaataagatatatgtatgagcttcttgaaaacagaagcactccaaggagcgctgaggaaagcatcggcagaggctcggtgaatgggcccagagctctgggcagtgagccgctagctgtgtttccaaggtatccacctactgactgagtttgtggggaatatatagatgagcaagtttgtgagaatacctgggtgtaagaaggttgaataatgagttgcttttgagcgggttgtggatctccaggaagagactgcagaaggcagctaggaacgtgtcgaggactcaaaggagtgacctggcccaagatagatttaggtatcttggaagccaagtatgaactatagctgacggaatgtgagtgactcaggaatggcgtgttggggggtcagaggagaactggaagggatcaaagggtgtaagggtcgggtcagaggaagccagatggggtagacttggaatgtgggcaagatggagaagcagggtcacgtgcagggtttgaagagcgctctttaactgctgtagcattggtctccagcatgcctcacgggcaccacggtagatttctgcctccatctaagctgcggcgtgctcgctgccgagacttcggtctctggcgcccgtccccacggttagccctccctcacttctccaccccaaccctgtcctctggtgcccactgccctgttctctgcacccctgtttgcttttgtctgttcatttatcttggggttttgctacgctccaggcataagagagatcataagactctgcccttttcccctttaacttacttcactgtgcgtagtgccctcaggggccttctgtgctgtcccaagatttctcctttttttcatggctgagtaatatcccgttgtagatgtgtaccagttgagaagatagaattattaggcaatataattatctacgtgttgataatcccaaggactggaaatggttagtgacagatgttacagagagatcaactgaaataaaaataaacaaccttgaaagttgaaagttgctgagatgtttaggatgagtattaaaggggaaataaaagaatcctttcagactgaaacagcgacattaagaaaaacaaaacagaagcaaaaagactgtaaatgattgcaaaatttaaaaaggatagtgtggaatctaagggtgaaaatagtcagcaacttgtgttgctggtaacgatggttagattttttcaaatgcatagataatgtgttgtttctcaacctgatccgtaataaagtaatgtgcccagtttttcatttctaattttgagatgtgaaaaattgtgaaatattatttgagaatataaactgattatttaaaagaaacatagataacacttaaagcatggttacctctttacacctggaactgtgattcagttcagttcagtcgctcagtcgtgtccgaatctttgcaaccccatggactgcagcacttcaggcctccctgtccatcatcaactcccgaagttcacccaaacccatgtccatcgagttggcgatgccatccaaccatctcatcctctgttgtccccttctcccgccctcaatctttgctagcatcaggaccttttcaaatgagtcagctcttcgcatcaggtggccaaagtattggagtttcagcttcaatatcagtccttccaatgaacacccaggactgatctttaggatgaactggttggatctccttgcagtccaagggactctcaagagtcttctccaacaccacagttcaaaagcatcagttcttcggtgctcagctttctttatagtccaactctcatatccatacgtaactactggaaaaaccatagccttgactagatggacctttgttggcaaagtaacgtctctgcttttgaatatgctgtataggttggtcataactttccttccaaggagttgctgatgctgccaagtcgcttcagtcgtgtccgactctgtgcgaccccagaaacggcagcccaccaggctcccccgtccctgggattctccaggcaagaacactggagtgggttgccatttccttctccagtgcatgaaagtgaaaagtgaaagggaagtcgctcagtcgtgtccgactcagcaaccccatggactgcagcccaccaagctcctccgtccatgtggttttccaggcaagagtactggagtgggtgccatcaccttctcagtgtcttttaatttcatggctgcagtcaccatctgcagtgattttggagcccagaaaaataaagtctgacactgtttccactgtttccccatctatttgccatgaagtgatgggaccagatgccgtgatcttcgttttctgaatgttgaactttaagccaactttttcactctagtctttcacattcattaagaggctctttagttcctcttcactttctgccataagggtggtgtcatctgcacatctgaggttattgatatttctcctgacaatcttgattccagcttgtgctttatccagtccagcgtttctcatgatgtactctgcatataagttaaataagcagagtgacaatatatagccttgatgtactcctttcccaatttggaaccagtctgtttataaggtttatacgtctgtttataaggttgggtatgctcagttgctcagtcttgactgtttgtgaccccatggattgtagcctgccaagctctgcccggccatctttattccagcttgtgcttcatccagcccagcatttctcatgattatttatccccaaaagaaaactaagggttaattaacagtgttcttcattctttgatgaactcttatgtaaatgacagcagccatgaatatatgtaggcaaaagaggtttgaagatggaaatagatttggttcctgactgtagtcttactatcttcatgactttggccaaaatacaaaccattctaaccggtctttttacctataaagtggtgctgagcctgttgtgaaagttctgtgaatgtgacatagtgctcgtgaagcgcatggatggtctggcgtcagtaagtgatgactgatggtctgtgtgcttcctcaagaggaagaagcaaggctgaacaggcaggactctatttgagggtctatctaagctgtgggttttctccccctaaatttagtgtttaattgatgctttataaatgagcaagcttattcctgagcctcttagtttccagtttccatttacatagtaagcttcctgaataatttaatgtgtcgttacgtgttggtttcttcctgtttttgtaactccctggctgtctggtggttaggagctggtgcttccactgccagggcctgaggtttgatggctggtcgaggaactgaggccctgtaagctgtgtggtgtggctataaataaataaagaaagaacctttaaaagataaaattatcagttgctttttatgtaggtgtacagatagataacatgagtttgagcaaactctgggagatagtcaaggacagggaagcctggtgtctgcagcccatggggtcacagagtcggacacgactttgtgactgaacaacaacgacaaacaggcaagctgtgaaggttctgggcgtcactgatcattaaacagcgccatgcagaaaaggaagccccaggttatagctgacgagaactcgaagaatgacaaccagttcctcaccgctgcgctgcttctctatgtgaccctccccacaacacattcaggtcgccaagcctccccctcctgtttgctgttccaccgtcagttccgctgggaagtcctccctgatgaagcagaatccccgttgcacacttccctagcaccctgtacttcctcttctaagcactcggcacggacacggtcttacactgatgtatgtgattattccattattccatcctcttgccccttcagggtggactcgaggctgctgtgttcccgttgtcctcccagtaccccacgtagcccctgacacaggaagtatctgcataggaggatccatggattggtgggtgggtggctggctgggtggagccagaagaatgtttatctttccacactgtcttcaccccagctgtgtggtcttccttctactgggattgccgttgctgcccttttcctatgggcaccttcacaaccttcgttctcatccagctgaaatcacacttcttggttataaaatggcatccagattctcagcttcctaatgaaactcctctgaagattcaggcaaacaatatcagaatcacagaaaccaaacaaagcagacaacctcctgcctacaggaggtgagctcggttagcgactgtcactcccagctgatgtgcagtgtattttagggctggattgtggagaccatggtggtctttgatgtcttgctgagaaactgaaactttggcaattgagacttgattcagaactaagggagggaagtaaaaaaaaaaaaaaaaacctcagacctgtatttttcgaaggtgattgaggtgttattatgtgtatcagcaggcacaagattaaagacttgatatagtcaaggcaaaaatcaagacagttctgaaccacagtgagggtcctggtcatggagctgtggggtcttgccacaggtgtcctgggaggcagaatgatataagtcgctcagcccagatgttttatgtcctaggtctagggttctgatagtgagagtgaaagttgctcagtcacgtcccgactttctgcaaccccatggactatacagtccgtgggattctccaggcgagaatactggagtgggcaacctttcccttctccaggggatcttcccaacccagggatggaacccaggtctcccacattgtgggcagattttttaccagctgagccaccagggaaacccaatagtagtggagtaggtagcctatcccttctccagcggatcttcttgaaccaggaatcgaaccgggatctcctgcattgcaggtggattctttaccaactgagctctcagggatgcctggggttttaataagtggtttgaaatattaatgccagaaattgaggcttaggagttttgtggagagatgagtattgaaagatttgaacaagataattgaaattgagagtatatttcagagatcacaaaatcacaaagagttactgacagatctgtaagattcccttttgggcatgtgcctgtgtgtgtgtgcgtgtgcacgtgtgtgtgtatgtgcacgtgtgtgtgtgcctgtgtgtgtgcacgtgtgtgtgcctgtgtgtgtgtgcacgtgtgtgtgtgcgctcgtgtgtgtgtgcctgtgtgtgtgtgtgcacgtgtgtgtgtgcctgtgtgtgtgtgcacgtgtgtgtgtgtgtgcgcacgcgtgtgtgtgtgcctgtgtgtgtgtgtgtgtgtggtgaaatcttgcagttggtgccatttaaagcttctggatgaccttcaaaggtcagccttatggcatctcaccttccagatcttcaaaggcctctgtgaaaagagcgagtcctgcacgaggtcatgaaggtgaaagtgacgccgctcagttgtgtccgactcttcgcgaccccgtggactgcagcccaccaggctcccccgtccctgggattctccaggcaagagcactggagtgggtggccatttccttctccagtgcatgagagtgaaaagtgaggtgatgccactcagtcgtgtccgactcttcgcgaccccgtggactgcagcccaccaggctcctccctccatgggattctccaggcaagagcactggagtgggtggccgtttccttctccagggggtcttccctacccagggattgaacccgggtctccagctttccaggcagatgctttaacctctgagcccccagggaagcattaggtcatagaggcaggctaaacaaagtcagcataatgctgtctgacagacttttgctaagagtagcaagttcagccagagtcaggagctgtccttcatgcctgtttaatctaccacttaggtgatgtaatgattttagagtacaaaatctaagctgagaaggatataaaatattttttatcttgtttatataaagtataactaaagaattaagctttatttttagtttagtgcaaagtagtataaataagacggagaaggcaatgacaccccactccagtactcttgcctggaaaatcccatggatggaggagcctggtgggctgcagtccatgggatcgtgaagagtcagacatgactgagcgacttcactttcacttttcactttgatgcattggagaaggaaatggcaacccactccagtgttcttgcctggagagtcctagggacgggggagcctggtgggctgccgtctatgggatcacacagagttggacatgactcaggcgacttagcagcagcagcagtagcagtataaataagaaatcagaattgatccctaccagtaaactcatggtggagataactcccattgatggtcagatgggagtggagtaatgtgatgcatgatatgaaaatgacagcagtgtaaaaaaaatacaaagtacaaattcacatgctagtaaggtaatactcaaaatccttgaaatcaggcttcaacagtatgtgaaccgagaacttccagatgttcaagctgaatttagaaaaggcagaggaacgagccaacatccattggatcacaggaaaaagcaagagaatcccacaaaaatttctgtgtcattgactgtgctgaagtcttttactgtgtgggtcactacaaactgtagaaaattcctaaagaaatgggaatattagacctgcctcctgagaaatctgtatgcagatcaagaaacaatagttagaaccagacattgaacaacggactggttccaaattgggaaaggaatacaacaaggctgtatattgtcaccatacttatttatcatctatgcagagtacattatgcaaaatgccagactggatgaagcacaagctggaatcaagattgctgggagaaacatcaataacctcagataggcagaagacaccacccttatggcagaaagtgaagaggaattaaagagcctcttgatgaaagtgaaagaggagagtgaaaaagttggtttaaaactcaacattcagaaaactaagatcaaggtatctggtcccatcacttcatggcaaatagatggggaaacagtgagagactttattttcttgggctccaaaatcactgcagatggtgactgcagccatgaaattaaaagacgcttgctccttgaaagaaaagctatcacaaacctagagagcctattaaaaagcagagacgttactttgctgatgaagtttcacgcagttaaagctatggtttttttaaaatataaatttagttattttaattggaggctaaattactttacgatattgtattggtattgccctacctccagtagtcatgtactgctgtgagagttgggcttcccaggtggcgcgagtggcaaagatcctacctgccagtgcaggagacaagagtcacaggttccatccctgggctaggaagagcccctggaggagggcatggcaacctactccaggattcttgcctggagaatcccactgggggaggagcctggcgggcgatagtccatagggttgcagagagttggacacgactgaagcgacttagcacagatgtcagagctggaccataaggaaaacagtgcaccaaagaatcggtgccctgtgtggctggagaagagtcgcttgggcgtcaggcagtcagaccagccagtcccagaggaaatcgacctgaatactcactggaaggactgatgctgaaaggtgccagagagtcgatgccctgtgtggctggagaagagagtcccctgggcgtcagggagtcaaaccagtcagtcccagaggaaatcgacccgaatactcattggaaggaatggtgctgaaatgcgctggagaatcggtgccttgtgtggctggagaagagagtcacttgggcgtcagaaagtcagaccagtcagtcccagaggaaatcaacccgaatactcattgggaggcctgatgctgaaatgcaccggagaatcggtgccctgtgtggctggagaagagagtcacttgggcgtcagggagtcagaccagtcagtcccagaggaaatcaacctgaatattcattggaaggactgatgctgaagctccagtactttgaccacctgatgtgaagagccaactcattggaaaagaccctgatgcttgaaaagatagaaggcaggaggagaagaggacgacaaggttgaatggcatcactgactcaatggacatgtgttccagcaaattccaggacactgtgaaggacagggaagcctggcgtgctgcagtccctggggccacaaagagtcagacacgagtgagcaactgaacagcaacaacaaaaacaaaagtctctgggagggagagggataaacttggagtttgagattaacagatacacactattataggtaaaatagataaacaacaaagatagcaagctatattcactatcttataataacctataatgggaaagaacctgaaaaaggatatatgtgtgtgcgcgtgtgtgtatgtgtgtgcgtgtgtgtgtgtgtgtgcgcacacgtgtgtaactgagtcacttggctgtccacccgaaactgacagaaggtagtaaatcagctgtgtgtcttagttgcttagtcgtgccctactctttgcaacccccagactgtaaccggcagccttctgtgtccatggaattctccaggcaagaatactggagtagattgccattcccttctgcaggggatcttcccgacccaggagtcaaacctgagtctcctgctttgcaggtagattctttactggctgagcaaccagggcagcccatcaatcaactatatactcaattcagaagaaaataaaagtctacctagtcccccttcgtatgcatccatccatttctcctcccaggaaaaaatgtgtgtctgtgtgtgtgtattcatttaccagtgcatatcatattttttttaaacaggttaagatgtcatttacatacaataaaaatgcactcatttaaagcatacaggtcaatgatttttactatattgacagagttctgtagccttagaacacgttcataattcccgaaagaacccttgtactccttatcagtcataccctagttttctccctctgcttaaaactctttccaccccaccctaggcaaccactcatctgattcccatccccgtggacttgcctattctagatgttttgtgtaatacagtatttggcaggggtggggggagctggtggcgggcttccttaattagcatagtttttgacgtctatccatgttgtagcatgtagcgatacttcgctttttattgccagttaatattccattatggatataccacattttgtttatccattagtcacttggtaggcatttggactgtttccactctgttcagttcagttcagtccagtcactcagtcgtgtccgactctttgtgaccccatgaatcgcagtacaccaggcctccctgtccatcaccatctcccggagttcactcggactcacgtccatcgagtccgtgatgccatctagtcatctcatcctcagtcgtccccttctcctcctgcccccaatccctcccagcatcagagtcttttccaatgagtcaactcttctcatgaggtgtccaaagtactggagcttcagctttagcatctttctttccagagaattcccaggactgatctccttcagaatgggctggttggatctccttgcagtcctagggactctcaagagtcttctccaacaccacagttcaaaagcatcaattcttcagtgctcagccttcttcacagtccaactctcacatccatacatgaccacaggaaaaaccgtaggcttgactagacggaccttagtcggcaaagtaatgtctctgctttcgaatatactatctaggttggtcataacttttcttccaaggagtaagcgtcttttaatttcatggctgcagtcaccatctgcagtgcttttggagcccaaaaaataaagtctgacactgtttccactgtttccccatctatttcccatgaagtgatgggaccagatgccatgatcttcgttttctgaatgttgagctttaagccaacttttccactctcctctttcactttcatcaagaggctttttagttcctcttcactttctgccataaggctggtgtcacctgcatatctgaggttattgatatttctcccggcaatcttgattccagcttgtgtttcttccagtccagcgtttctcatgatgtactctgcatataagttaaataagcagggtgacaatatacagccttgacgtactccttttcctatttgggaccagtctgttgttccatgtccagttctcactgttgcttcctgacctgcatacagatttctcaggaggcaggttaggtggtctggtattcccatctctctcagaattttccaccgttgattgtgatccacacagtcacaggctttgtaactataaaaaataatgctgctatgcacatttcccatgcaagggttttttttttgaaatattttttatttctcatatggttccttactctacatccagcattttgaggaactgtcaaaagctgttttgcaaagtggctacaccattttacattcccaccaacaatgtatgaaggagggttcacatttctcagcacacttgccagcgcttgttgtaccttttttattacagccatttgaaggggtgtgaagtggtatcttactgtggttttgatttgcatttccttggcgactcatcatgttgagcatcttttcatgtgcttttttgagaaacagctctttgggtcctttgtccatctttaatcaggttgtcattttattaagagttgtgagagttgtttatatattctagagacaagattctcatctgacatgatgtgcagatattttctctcatctgtaaatcatcttttccctttcttaatggtgtcctttgaagcacaaacgtttttaagtttgatgaagcctaacttatcaatattttctttcatcacttatacttttgttgtcgtttctaagaaatcacttcctaacccaggatcacaaagatttactcctgtgtttcattcttaaagtttgatagttttaactgttccatttaggtctgtgatccactttgagttgattttctgtggtgtgagatagggattcaaattcattcttttccatttgggcattaattgtgtttgttggaaaagcttgttctttgctccattgaattgtcttgcctctttgtcaccataagcgtaagggttcctttctggacgctcagttgtgctccgctgatgtatacgtccgccctaatgctagtgccgtgctaccctgattatcgtaactttgtagtgttttgaaatcagctaatctgagtcacttgcatttccatatgaattttaagatcatctttgttgatttctgcaaacaattccttttttaaaatattggtaaaaataccatttgtcatcactgcttttaaatcatagtcatgatcaaatcagatgtatatcttacttaataattaatttaaaagcatattttacaatgtcataggggcttcccaggtggtgctagtggtaaagaatccatctataggtgcagtaagtaggcgcaggaggcaccggttcgatccctgggtcgggaagatcccctaaagtaggaaatggcaaccccctccagtattcttgcctggagaatcccgtggacagaggagcctggtggggtgcagtccatggggtcgcagagtcagacctgacagcgtgtgcacatgcagtgttacagatttgttcagtgtttcagttactgcgtttcagtattatcatttttcctttataatcctatgtattctcctgtgtatttaaaaacattattctgaaaaggggaccaaagtcttcaccagaaggcagagtagttcatggctcaaagtgatcaagagcccatagcatggataggctgaagcgaacagcctactcactgaaaagaccctgatgttgggaaagacggaaggcagaaggggaagagggagacagaggatgagatggttggatggcatcaccaactcagtggacgtgaacttgggaaaactccgggagatggcgagggacagggaagcctgtgctgcagtccatggggtcaaatagccagacacgactcggcgactgcacagcataggtgtcacttgagggactgctccaagggcctttgcttttaatgctgggctgcatcgaatgtactgattgaagacggcctacttttatgacgttttccactctttagagaattaacacctggtgtcagcgttcttatagtggcaatgaaatctggaataaaacaatcaagaaggcaagaagagtccatctatagggccatttcttggcgtttctgggtttaatttgacatactttctcaaatggagattggcctcactcaggaaaataaaactctaatctgtagctatgtttggtttctgagttctttacttggacatttcaaaattcaaaatgaagtatgtatgcttcattgttatcctagaaagtatcacacacaaaaaagactgtaagtgaatgaccgtagtaagagtctatttatatgagatttttaattgcaggatgttttttcattgaagtgactcccaaaattgcatgagaagtgtgctgtgcaaggctttcttttgccaggcctccgtgtgcaggagctcagcttttgttccctgggcagtgaagatagcagggcaggaaagggaaggaaggtggggtcaaatgtctcaaattagggttctcagtcctatggggtcacatggactcactcttaaggattcagaactcctaaagccatgtgtacattgcttcgtcttgatgataatttgtttaaacttattttagcacttctaaaaataaaaacttgcgagggtaatttttatatccgagattttagttccttaaagtctctttcccaaattggaatatttagggattttttttgagatttcctctttccgttctcttctttatatgattgaaagttgggaaccttcactctctggaaaagataaatggggttccatgtgtctgaaccagtgaagtcaggctcctgccctactctgctcacagtcagggaaggaaaaaggtgaagagttcagaactgagctcaccaactgccagaaaagagggttttgaggcccaatgtcagtcacaaaaaaatgggtaaatgtgaacctttttccatagttctttatgtatttatactgggggggcatgttaatctggccttgtcctccatgctaaattccaactgtaaatgcattggaagaaggaaaagacgtatttctcttgggtctgttgactgtcgaggctaccgtggagcgtagcgctcaggtgggctcagcgcccctctgcgtctgaggtctgggcttgccgagctgggctgtggctgtggcttcagggagcaggcttgcccagcgcgccacggaggctggagcagcttcagagctcctgtctgtgtcctcaccagttcacggctttgcttcctttttacttttaaggccttttaacattgttttgttttaatctgtagatgcatagattgaaagtacctaaatttttctgtcaattgcccgaagattcttaatatctaatatctgcaatatatatttcttatcaaaaagacatgaactgttagcatataagccagaggtcattgtaatcctgatcctgaaatgaaattctgatttacaacgctgttgaaaaggtgtgttttctttaaaaaaaaaaaaaaaatctatgttcacttggtgtatgtgttgtatccacgttttagatttctgaatattattaaaaatcaaactagattttacttttgggaatccagtgttttgtgaacttacaagtatttggtgtttaattcatggtatggggctgttcaaaaaaaaggaaaaatgatttagataaggcaggtatggctcatatactattatacataaatacatgcagtaaaatcagtattgtctcagtagcaagtaataggaaaataaaaccagctcttggataaatgatgaaggaaataaaatgcaagtctagatttgatagcaatatctacataagaccacttattttatttatttacatattttaagggaatcttgtgagcatttaggattgtaacgtctgcctttgtgatcccctgtgttactctagttgtaatgaagagggccatatgtggcaataagaagcagaaatgctgagacctttgtggaccctctagcaatcagtgaatatcagatcacaaatctccccagctttaattacaggcaaaagaaaagacaaaattagcattttaatatagaaatatcttaggctttaggagaattatgataaatctaatgttgcctagtgaaccaaagaggggatattacaacaaactgtctccttaggaatatttgtttaaataaaggcaacaatacttcatccttatcttttttgggtaattatcgctatttcaggctgttctttgttccaggtttaaaatacctttagttggaaaaaaaagaaaaagtaattggcagtgtttgttttccataaaactataagaagggaaaaatcctgtttgcttggcactaaccagaaaattattttagggagagtttttgctctgcagcgccagttcactggtgccgtggcggcccgtgcacttggatgtgtttaggttgcctcatttcagctccagcgtattaaaacaactcctcttccagggctgaggtttgcccacctgtctcccctaaaacacctgcaacatatgtttgcataaccctgtaatgctttgcctttggggtgctgagaaattcccccagagctttttgcttataaacagctgagcaattcgtttttctaatgacggttgcttttcccccagcattgaggcaataacatattcactaaaataagagtctcatttttcatcaaagagaaacgttcgacatatttctacagtgctgtttctccttccgagccttgtttttccccttttctaatctggcgtgctaaaaattaagagtgggtagcaaggtatcagggaaaagaaaactaagtaattcttcatttggcaaacattttcttcatgccaaacagacattgtatttacattgtaaatataaatcaaccttttcaatttgacaaatgctacaggaactttatcagtttaatttaatgtaaaaactgtaaccaataataatttggacatattgtaggaaatccctttaattattttaacctcattagctggcaaacaactgtgctttaatagaatgtggtttacagtttttaaaaactggtatgtgtatacacactcctgttctgatttgtaagacagattttctccacacctatgaggcccaatgtgtacaatatatgttcctaaatatgtgttacttttctaaaacaaatggaacgtttggtaagccctgccctaagtttcttgatggttatcagaaggatggaacactgctttctctaccagttggccattgtggattttaagtcagtcaaacgatctgatctactgtcaacatcctgcccatcagcgttcaggggtatcagaagggaattctggcttctgttttctggagcttttccaaagtgcccaccactgtgccacgctttatgtccagtgcccggtttaaccctttccgcagttttgcagatgaggaaatcagcaccagggctgtgagtcctccacaggcaggcgtgggtggagtggactcgaacctccctgacccccgaccccttgcctccgccccaggcagcctgagcccctgcagcagacggcgggccagccacagtccctgcgtgtttcacatcgaacttgagccttcctcaccccctgctggtggttcgccagagccagggttgctggccctgggccgctcctgcctgctcagttccatgcgttgtcagcaccaggcctttgaaagccactgcgttgttcaagcgggatgagtccctcggactcttctccttctgaagttcccattaacggtgcgaaaggagattgtcaaccgcaggtgagggaccagagttagggggtcagtctagagtgttctgtctgtaatgccctttgtggatgagtttgacctcaccaggctcagaaggttgtcacatttcaccttgtggttgagtgtgcttctggtggtagctgtgcttggtgtgggtcagcactgaaggactcgcatactgccatttagtggtgcacttggggcttccccagtggatcagaggtaaagaatccacctacagtacagcagtgccaacaggaaccgtgggcttgatcgcctggagaaggaagtggtaacccactccaggattcgtgcctcagagatcacaaggacagaggagcctggcgggctacagtccacggggtcacagaagagccagacacaactcagcacctaagcaacgtactaccctagaaaagtgagtttgaacgtgaaatccggaagtattattgcgagggtaggagtggcagggaagggcgtctgtcacagagtagagcagaggggctgggccaccatccgaggtcacactcggtaagggagagagcgtctcacctgaaatgacacgaaggctcagcttactgtctatcccatggacctcagaagtgaaggatgttaactgcaacggagaggttaggattcagtctgttttgtccctagcatcgattgctgtcatttaggcactccttgtaaattgacttgatcatgccaaattaacaaaagcactttgaaaattcagaagtaccacacgcgtccggtctttcccatgtagttccctctaggactttcgtttctgccattatctatcctgcttcggttaagcactttggcccacagggctctaggctgcctccccaggttccagctcatctgtcccgagggtgggagtctcagctttcttcctgtgttgccataatgtacgatgctgaagaaatggcaacccagtactcttgcctggacaatcccatggacggaggagcctgttgggctacagtccacagggttgcaaagagttggacacgacggagtgacttcactttcacgctgctgaagagaaagccttcagatggacgagctccagtaggttgttaacagaggaggggatggtacctgggaagtaaatcagctgcaatcttgtggaagatttatttcaagtccatccaggttggtctagggaaggcacagtaaatccagggtgaattcagcttgtgatttctgcattttcacgtgtagttatgtcgacttctcagggcatgaaacgtaagtggttatgtctctgtacacagcccactgtaagttaggattaccatcttttcttctgatgaaaaagtctccccccaaagtggtgtttctttgttgctgttgttgttttgttttgttaatgcacattggcttggaaaagcttacaatacttgaaatcttgactgtgtgaaatgggtttaaaataattgctaattgtcccaatcctttgccaaagacttaccaggttaaagttgtcgacatcacgtgtcctgaacaatgagatcttacaactgtcgtggggtctggtctttcttaaataaagagtcttatgtgtgtagaattctagtggctcttaaattttagagaaaattccaggtctgtaaaaagtaagaattaaaagctgttatattcctattcggtttggaaaaaaattctttaaaacaagagagacaaatatcttcttacttttaaaatgatttcactgcataaggttagacttctgctcatggaatctcatcccacctcttacatagttgagtgagaagttactgctctaaaatttcttaactttgtaaaactatattcagaagaggcaaaagtaactgaattaattcattattgaccagagacatattaatacgtcttttgttacccaaacattattgacctgagacatttcgagattcacttaataaatcgccagccacaggtattcgtttctgcaaaaacctctcagtcaataatgtgttaaaagagaagcattataggtgaattaaagaactgtcagtactgaatcttactgtataaaagtatgtgccttttataaatatgtgtctatatatgtgatttctgtagccacatgttgccttacttacatatcagacatttggttctgttctgttcattatagtggctgcagtcttcttgtggccactgagcccttcaagtgtggctggtccaaactcagatgtgctatctgtaaaatacatgctggatttcaaacactttatacagaagaaagcatgtaaaagtctcaatttttatactgattacatgtttttagtgtcaacattttggataagtcaaatggaacaaaatattattatatgtactttcactctgtttttttcctctttttttatgtggcttgctagaaacttttacattacatgtgaagcttgcatttgtgaccagcattatacgtctgtgggactgtgctagtctagaacgtccgtggtatacctacttatgtcttagtgacagcagatagaaaatcctgttgaataactttcaactgtaacctctggttttattttcttacatttcaaatactgtttttcaacatcatcttttcattcttttttttttcctacccctgtgtggtgtcactttaagccgcctcttcatttgatactagtaagtctcctaggaatttaaatagacctcggtgaaagccatacttgagcctcattcatatgttcaagttagatcatcattcctaataatggctttaagtgctttggtggatcggcacttcatgtcttgaattgctgtcatttctttataaagatatttcaagaaacagcacggtgcctccccttctttcattgttttctagcaaaaggtaacagaatcctttattaatttattgaaagtcagagaagaaaagccttttatagtagcaaaaacgaaacgtttccaagtactgagaataaggagcaaaactggtcatgagtgatactcttaggaaagttaattttaaaaataaatcatgaatgcactgtcagtctgccagtggttttgacccctgtttcattttcccgttatgcttgggtccaggttgtcatcagctaccacaaggaaacctatgtaattcctagagagcgagaagttgcactgttaggcttaatagtacggtagtcatggaggcatcagttatcttcatcaaggcaattcagatctgattattgtggaactgtgctgaataccaaaccagtggagtagtagctggagctaaatcaagggattgtcatttttgtcagatgattagggctgacttggaagagatatgaaagggttgagctgtgtaaatactctcttttcagcagaaaaagaaaaggtccattacggccttaagatgcagcttgttagcttgatgaatttcaaactatttaaccttagcaattatgtcccccgcctacatgaaagtatatctgtgccttggggttatgtctccaaggactgatatgaaagcatgttgataattttctattaaaataaaattcagcctttctgtgtctagttggttctctcaaaggacagggcgtgctgtttcaaggtccaaattattaatttgaattacatgtttaggtaaacactggatcacatttacttgttttaaaaaaacttcttaatgaaaaatatgtagtttaaccttttagaggtgatgatattcaggttatgctattaacgtgttacattttttaaaaagtgtggtttttatagaagtgtatttgattaatttttatttgcccgaacttgatacttacaaattatagacacattaaataatagcaacctgtttaaatagacacacccaacctaatgattcaagaacatttctgcaagtttataaataatattaaatgccagaaagtgcagtgtgttgctgcttttataaaaatgtgcgttgggcagtttgctttcgtattgtggtggtaccctgataatatgtccactacctgggcacttattcaactcgtatgtaagaacagatgacatagaaactgctaacttggaaagaattgccgaattccagaataatacattcattttagaagaggaaagactcagtgtgccatctagtgggcgtacttggcatcctagttgtcaaaaactggtttttgctcttcttcaaaatgtagctttcttaaccactgttgtgtctcctagccctaagaatagattgtactggtgttacatcttacataatacctcagttttgttgtcattttatctgattgtattttggaaaggcatattgaaactgatcaaaattattgaaatctaatggaaggaatgaatcagtgtgacctgagacaggtaaaagtaaaatgtactaaataattttagtgtttaatcagacaaagataagttagggcaaaacttcaacaatgaaaaaaatacccaagcacattaattattaaacatcattattatatgtatttttttctttgagtataaaagcgatcgtttcatcattttttgtcttaatatacaaatcatataattttatacattttaacttcttgctttttttctgtagagaaatccaagaccagtgacctaccagttccatccaaatctggattattacaaagcccgaggagcagacctcgtaaataaaagccggtgagtcctctttctctgatggacgttctgagtcactaagatgttcttggagattgtcaggagatgttacgcatttgctgaaaataattttccaggttttagcatatcagtggttaatgcatgtaatgaatctctgttaaataaattatctgagtttttctttgaggagtgagaaaaggatgtatgttgatgtcagtggtcataaaaattaaataaataccagagtacttgttacagattgaattttggcaacttcatttttccaacactaataaacctaaaataaattatgcctacatgtataatctctttctagatcctttctgttgattgaaaagaggcagttctataatatatgtttaaattatttcagtaacaaaattaaaattgggtttcccaactgtctttagaactgcacaataagcttataaatgcatcttatgtgtgcatttgtgattacatacatagaaactttaagggtcactgtaggaataaaaaatcattaaaatcctacttttaaaagaaattcccacttgcataaagggttgatgaacagttttgttctttcataataccatactcagatgtctcaagagttgacttgtcaaaccagaaccatctcaaattagagcttaatttcgaagtttattctgaaagactgaaatgttagtcatgataaatgctgcaagttgtccagattttcttcctgaagcattttgattgttgctagcttttcttcagtagaagcccagcaacctaagtatacacggatggagtagacttacatgatatgttcttctcttactttgagttaaaaaaaaaaaaaagacataattcctgacacattgaagcccatagtccaagggatgagaaggattttataagaacacagccatatttaaacctgcagtatttttaaatcgtgtgtccctgtccgaagcctgccccttactctgaggggctgtgtgcttatgagagcagttcccacgaggctctcggaagctctggttttgccgtgctgggtctccgtggcgagcacaggctctctctggcgacagtgagtggggcgctctggaggttctgggctcggaggcgtcagaagctgtggcccgcgggctccagagcgttggctcggtacttgtggcgcctggatttagtcgctctgtggcatgtgggatcttcccagaccagggattgaaccagcgtctcttgcactgcaaggcagattcttaacccctggaccaccagggaaggcctgaagctcttttctgtttgtccatttgatttttctttcacagataaaaaggttcattccctatagtcacttttgttcatttagtttcacaaatttttctggagtgccagactgccttgcagagagtggacaaaccggagaaaaatccctgccctcaggagtcttactgtctagccacttgggtttcctttctctcttgtcaagcatggaggctggatgtgctctttaaagtgtgtgtaaggtcctttcttcatgcagactcttcctagcaggagtcccctctggcccctgggctccaccccacacccgctgtgtgccaccctggccccaggtgagttttcacaggaccgagttctcggtttacagcagagggtaccgcgttcccactgaagctcccgaaggctcagcagtctgctcctctccccctgccccctttcttctcccaccggagctgccagggccttccgcgttcccctcgcacctccctctttctctgtggcttcagcgcgaacatcatctcacacaagcctctctctctttaaagccgtcttgaggtgtggttgactcagtgctgcgttcatctctctgtccaccagtggctcagttacgcacgcgtgcacccttctgttcttctccactgcggctcatcgcagggtgctgaccggggctcccgtgctgcacacgagtacctggctggctgtcggcgtgtagatgagtctgcatctgctcatggcaaactcatggtccacccctcccccccgcccccgccccaccttggcaaacacaggtctgctctctgtgtctgtgagtctgttctgttttgtaaatacattcatttatgtcatatttcctggagaaggaaatggcaacccactccagtatctttgcctggaaaatcccacagacagaggagtctgacgggctgcagtccacggggtctcaagagtcggacacgactgagcgactccaccaccaccaccgtgtcgtatcctagagaccacatccaggagatgtcacccagcatcgggcgttctctgacttaggtcacttagtagcataatctctaggcccgtcatgctgccacagatggcagttatttccttcttggtatgactggatagcgtccacggcatccgtggaccacatcttccttacccgttcatctgcagatgagcatctgagttgtatctgaggcttagctgctgtaaggcatgcttctgtgcccacaggggtgcgtgtgtctgtctgacacccagcagtggggttgctgggccaaacggcagctctgttcttagttttttgaggaagctccatgctgttttctgtagtggctgcaccaatgtgcattcccacccacagtgcatggggttccctttgccccacaccctcttcagcctgtatggcttgtagactttttgatagataatagccattctgactggtgtgagatagtatctcattgtagttttgatttgcatttctctagtcatgagcgatgatgaccatctttttctgtgcccgttgtccatctgcgcgttcacacaagcctctctcggtctctgttttgtcttcacctcccttgatccctctagctgattgctccgcatcatatgcccctagcattcatttctcactgaagccatatacatatgtaccatctctctgcccagtctccacactgagggctaagcccctgcaggtaggtcgcctgtcttacctcctgagggcacctgggataatccttgctagtgtgagggagttgatagctgctgttgtgtacacatgattcttttcttttcttttctttttttttttttttttgcatttttcaacatctccttttcttctttttcaaagaaggaaatagactaccctttccttttccccttcatgttttatcttccatttagctttctgtccctgcattcttctcagaagtgttggttctgttttaggtattttcttataagcacattgagattcctatatgcagtgtcactgtaaagactagaaggcagctttctcatcatcaccatggcagtttcagagcctgaagctgaaagtgaccaagtgcagtgcagtgtgtgaagacaccacagacaagttgaagttcaaagatggtgttggggaacttgacaggtcttttgaaaagatatcaacttataactttaacacataccaaaacaaattctgaattaatcggaattcactcaaacaagcaaacatagaaataaaacccaagggcctgtctgacctctagttacttgacttttgatccttaaaagtcatggaagaaggcacaaagggaaggacctacggattttattgcacaattgtttctgaacagatatgtcagaaatgtttttaaaaaatgaatcaaaagcaaacagaaaattggggagatatttgtaaaagaaatgactgaaaaactataatatcattaatgtgtggaaacttgcacagttcagtaagaaatacaagctcctgactcaggggctgtcccatctcctgccatactcttctctgccccgaggacctcagcccagttcctggcgtgggttccatttgtgactgaagggcccttcgtttgtgtcttcagcctgacttctttcctcaaactccaggcttgcttgattgcactgaactcttggtttcacctccacacacctgttcctccctaaccgggaatgtcttgaccggctgatccagccttcgaacgccctgggctcctctctctccgtgacgtcacccgtcaggtccatcagccgtgcctgctcgagctgtatcctgaagcagtctgtttcccctctctgccctgccgatactgagtcttgtatcccggccagtccccccccccacggcctcctaacgcgcctcccagtgcaggtccgatcttcggcgcttccgctcagagccctagtggctttccagcacgcctggcctcaggtccagcgccgtgcagggctgcacggaggccctgcgcgacccggctcctgtctctgcaccccccgtctgcgcggccgcccggcccgctcaccgtcccccagctcccggtcagcccccttcaggagctgtgagctggctctcgccgctccgggctctgccctgagaagccgccctgcgcctgtctgtgcagaccccgcctcttcagggagcccctccgcggccgctgtgtctaaagtaacggaccccttgactccctttattttgctctcttactgtttttgcttttgtggggctttttaatagcagttcttactacctgaaatggtatttttagctttttattctactttttgtgtgtttttattgtttctcacattgaaatataaattctgcatgttttattgtctgttgtatcctcagcacctaaaatagtgccttgaatatagtatggactcaataaaagaaggattgcaacagcaaataaacatcaaaaggctggtcaaactcataattagtcacagaagtgcaaattaaaacgcctgtgaagtaccatttttcacctttcaaaatagcagattaataacaaatgaggcagagatgagtaagtcctagatatctactgtacaatactgttatgtacctaagatttgctaagagagtaaatcttattttaagggttcttatcacaaaaataaaaatagccataatagatagggtaggaggaaacgtcaagggatgagggtatgtttatgtcacagattgtggtgatgcctttgcaggcgcatgcttgcctctaaactcctcaagctgtgcacatgaagaagacacagccgctgcaggtctgtagagcctcagtaaggtgacttgaatgagtgagcgaatgagtgaccgagcagaaggagcgtggatacccgtggtcaccggtttagggaatgtaagttgaaacaaacttgatcgtcttgctaaataatactcccacgtctatatgtagcccttataactaccgcattcttcctctagaagttggtttattgtgccattactttatctaggatgaaaaacctattgtagctattgtgaaacctactgtgaaacccttggcaaaagtccccctttagctatttaatgcccaagatgttttcaccaggctggacccttaagccatagccttacaactactttctcagctatttagaggctattaaagagttcatgcatcggggctgtaccgagcagcaagacaggctgtggggctgatccagagggaagacacatcttcatgggggaacctctggcggtgatgagtgagtggaggacaggcgagggcgggcaggtacctggagggcagggagctaatccatgccacgtctggatgcagtccacaacagtggacttctgtttgtgctgcttatccaaatgagagatgaggatgcaagatgacatgtgatttcacggataagaatatctctagaaatcaagaagcctgatttctcttctctgccttaccatggattgctgtaattaagtctttaaaagcaagtgcctaggtattttcgtgatagattttccattacgtgtgtggataacattcactgtgctctgattttacttagctgcacatttctttttaaaaatgggaattgacatttccttattcattcaacttttgagctcagaacaacaaattaacactcaaatcctgctccaattttgtccttaaataaccataaattacttctataaataaaaataagcacatctaaattgtgaccagtcttcagaaagacccgtctgatttattgaggagtttgtgacttctgaaatgcccaattgagtattcatggaacggagcttcatagttttaactattgcggtctcttagagtaagagtgaactcacagcctctacattccagagcactcacagcctttcacagcctctaccttccagagcactcacagcctttcacagcctctaccttccagagcactcacagcctttcgcagcttctaccttccagagcactcacagcctttcgcagcttctaccttccagagcactcacagcctttcacagcctccacattccagagcactcacagcctttcacagcctcgaccttccagagcactcacagcctcgaccttccagagcactcacaccctttcacagcctccacattccagagcactcacagcctttcacagcctcgaccttccagagcactcatagcctttcacagcactcacagccattcggttttgaaagtgccacaacacagtttcttatgtagtttctctgctctcgcagaggtgatgaaacatccacacctgagctggcagcagggcccaggccacgtgcctctttatccagtggccctttttacgcagctccacgactggaggtcttctgatttacttaagttcatatcaccggagttagtgcttccacttgattgagtgaggccttgacacagacggaagaagccaagctgggttccagaccagcagtagcgtcctccatgctggtcccccagctcccctctgccccgtgtcacagccgcaacaaccggactggcgtcagtaacgaaagatgccagagttagagctctggccagtgggcccttcccaagaggccccctgtctggatgcctgcatggggtccacctggaagccaggctctgggtacaggcgcttcccagtaagggagcctctgctgggctctgccgacggtccccacttcccgctgctgggcgccgggtgacaagggtgggcggtgtcctgtccgttttcaccccaagaatgcctggtgcccagggattctccatctcttctcggaatcggagtctgcctctgcttaggagtcttcttctcaggccctggcctactaagcacgtcctcccagaaagcgcagaccttccaacatttgtcttatacccgcagccaagccttgtgagggcaggcccgcgtctgcccgtgtccctgttgtctcctcattacctggcgtggagaacgcgttccagcatgggtgaaatgagcgagcactttttggctgcatttatagagtaaccacgctgatgtcggggacagaatcctcgtattcccagggcctagcacaggacctggcactgtctctagtactcagcagtttaacgactgaataaataaatactgttttgaatacctaaaaggcactataaaattcttctagctaatttccatattatatggtccacaagaatttttaaatgaggctttattatatttactctgaagtattttattgctaaaatatggtaaagaaataatatgctaataatatttcccgagtcatgaagccaagaagtccatggttatagtccattagtagttaattggctaatcagaatttcaaaggacactgatttctatataaatgtaattttgtgatatttttatgctcaaataggagtttgtgttataagcacttctgtgtctgaaatgctctttctcttgtatcaaagagagttgttaattcctaaccaatttaggtaaattggtaacactatctcctttttagggcagagtaaataaatctttctcctttcttaaaaaatgtaagtataatttgtacataagacacagatcctaagcgttcagtctgatgagttttgatagctgtgtatactgcccgtctgcatgcaggctcagtcgtgtccagctctctgcaaccccgtggactgtagcccgccaggctcctctgtccatgggattctcaggcaggaatactggggcggtctgccatttccccctccagggaatctccccaacccagggaccaaacccgtgtcttgtgaccgccatctaagacagcgtatctggagtgaacattcctgtcacctgagagtcccctcctgtcccgttacggtcgcacccaactcatcgtctcgaggcaaccacttgatttctgctccctcattttgggtttccccttttcttggtcttcccatgagtagagacacatagtatgcacttcttttcattcagattgatgtgctcacacttcatgcagattgtttcatatataccagcagtttccttctttgcttgggctgtattccaccatacgatgtgccacaaatgttttgctctgttgttgacaggtagtgggctgtttccagatttggagtgttttgagcaagaccactgtgaacattctggtgcaagtgtttcgatgttttcatttgttattgttgtttttggtggatatatgtttatctttcccttggataaacacttagaaattaaattactctggctcagttgctaaagaatctgcctgcaattctgggagacctgggtttgatccctgggttgggaagagcccctggagaaggaagtacaagaattacaagtacaagtactagccccactctagtacttctgcctggagcatcccatggacagaggagctcggtgggctgctgtccatagggtcacacagaggtggacacgactgaagcgacttagcgtgcacaggatagatgtgtgttcaactttgtaagaacctgcggactgtttcaccaagtagctgtgccttttccatgctcaccggcaatgttcgggagtttccattgctcttcatctttgccagcatttgctgctgtcagtctttctgattttacctattgtagctggtatgaaatggtatctcactgtgtattaatttgcattttcctgagcaccttttcgtagcacactggtgattcctctttggactgtccccgcagtctgcctgttttttaatgggctgtttgtcttttttattcttgagctgtgagattctgtgtgtgttctgggtaggagtccttctctgacaaatgtgctgcagatattgtcccccagtgcggagcttgcctgtccattttctccacgatgccttttaatgagcaggagctcttcattccggtggcattccttcctcagctctgtccctttaggccagtgcgctttgttttctcatctgtgggatctcctgagacccacctgagtctcctttgttcaggatcctgaagaccgggcttggcttcgctggctcactggatggactctcagaattcggaaaagctgttacacccatgtttatggtggtgcatcatggcaaaaggatacagactaaaatcaagaaaggaaaaaaagttggtgttgttgactgaaaatgaacaacctagaaagttgagagctgtgttttacttggcagactttctgaggacttcaagtccaagacaggagtctcaagtcactctgagggcctgacgcaaaggcgcagagcgggaagccaggttacacaggagtttgtgcagtgaaggctgggtagtcagagcttcaaaagatcaccgttaattaaaggaaaccagtgtctcatgaaggggtgcagtgcttttctatgtgtgggatacgcaagagtctgcgctcgctgcagtccccccttcaacctgtgcctcgctgcctggggccctgcttcctcaccctgaggccctcgggtgtgccacgcggcggctgcagtggcgggcggctggtcggggcctccggtgcccaccctgagtccatcagcgctcacaggcagggaggctgtgatgtgatggcctgagggcagcagcacctttgtctgctgatgcgcaggcagcagtttcgctcggagtccaggagaggccaggtgtgagggttgtcccctcgcagtggagtgcttcaatccacctaaaccttgcagggctgcgcgcaggaagtgctgcccccggggacgttgcccagcacttggcgccctcggggttctgttggaggtcattcgtgcaggcagggagcagccctgtggtgacattagctgtctgccttccggcccctggtcagacggaggccatgtggcagggcccaggtggagacagactttcagcctgattcccactgttagcgtgcactctttgttgtggttcaaagtccgaggtctacaaagacatgtttatcagacagacattccaagggctagaggttccctcccagttgtccctgcagggtgggtcctgaactggagtgtgcagggtttggggagcccaggcacgctgacttaaccctgaaagttccagagatactctgtattcctctcaaaactggtgtggtgctaacagttgtattagatctgtggtccatgtcaaatcagtgtgtgtggagtgaggtaaaaattgaggtccgtctttttcaatccaagtatccagcagttggatactagttatgtaaaatcctctcctttctccattgaattaaactgggtccctggctgagaatcaatcaaccatagagataatcagtagttctggacactgagaatcaatcgaccgtagagataatcagtagttctggactctctgcttttgctagcaccacactcgcttaattatgtagcgtcacagcaagtcttgattttcttttttttttttaaattttggctattcttggttctttgcatttccatataaattgtagaccctacgtgtcagtttctctaaaaattattgggatttgattggaatacactgaatctgtaggtcagtttggaaagaactgaaacttcagtaaatccatgaacatgggctgtctctccattcagtcaggcttcacattctctccatagttgtatatagtttttaagagcgcaggtcttatagattggttttcactggagagaaataaattcctcttttttcctgcgtgtcgcctgttcctgcctgggactgcacttttttcctggctgcactggacccatgttgccttgtgagggcttcctctagctgcagtgagcaggggctactcctgtagcgcgagggagtctcggtgcagtgaccgctcttgctgtggagcacaggtgctgggcgcatgagcctcagtagctgctgcgggcggactccagggcacgcctcagtagttgtgacacacggcttagttgctccccagcatgtggaatcttcccagaccagggcctgaacccgtgtcccctgcatcagctggcggattcttatccactgcaccaccaaggttgtccaggctgtacttttttttttaatgtaactgtttgcttggaattttacatggactcatacatttctctatattcattgactcgctttcattaaaactatacggaaagtttcttaaaacatacctttttccttaaaactcttaagagttgattattgatatatgtttaagtatacctgcatgtgattttttttttcaagtgtaaacataagtagtgattctcacagaaggtagacaggtgacagggcaaagctccccaacagtggcagctcaagatggtaccctcttccctagaccagatactcctctgagccacggttcacgggagagacttgcatccctctcagacactgggtcagaaaataaatcagctgaaaacaactgccctggcatagaaacctcgaactttattcctgcagataggtcttagggagttatctcgtgatttttatataaccatggtctatgcacaattgctaattatttgttacattaaacaaatattctcaattatattcagacccagttagctgagccccacagtctagcttatgtcccccctcttacagggccaacttttctggccctaaaagcacttcgtttgcttcacatcacagtaacaaggacttacatgccacacgcaaaataatcatcatctttacagctgaaaggaaacatgtttcacttgaaagattcctaaggaatgagtaatagcaagctaatttttatcaggtagtttttataaagacctataaaatcttgagtttcatgatatatggagagagttcattttctgagatagcagaaacctcaggatatggcaaacaaatgagaattaagtatagatgtccttcattgaagcaagtttgatacactcaacactgaaggtaaagaattaagaaagttggaaactactttgttttatagaatttgaaacctttaacttagaaaatttgtgagtatatcccaaatgttagctcaaatgttagaatcatctcgagaagtactattttgcaaccctgacaactgttttaaatatctaaataaaagatagatgtatataataagcatgaaagaagtaaataggaatcatagtcccgggtaggtcaacaatggcaggctaggaaattatagagatgcaaagagagtatcatttctatcctaaaaccagaaccatgtgtttatatttactttttccaacaacttgcacttaagaaggtaattttaaagtaagttatatatttttatgattgaaaaaagtgtaggtagaatgaggtgagaaaatgatagaaaggagattttgatggaaggaaaggaaaagaagggagaaacgtctcagagggaagatgatcctagaggtggaaggaaaggcaaaaagaatagagaccgagggtggaaaccagaggcagggcagccagggaggcctgcaagcttgagttgggtgtggtcaccatcccacaagggcccacgctggcttccaggcccctctgtgaccttgcgtctcggcaggatatcgactgcgatgtaggaggcggctggcccagcccagcacctgccgtcaacagaggcagaaagggctctccctgaactctgcctctcgccccagccaggaggcctccttgtccgaaaacgatttcctaagctctgcttagacagtcccagaaatgaagttcttacattttaagtggagcctgtgaaatcatcaggaaggatttcctgggtcacagcctttgaactgtctcctgtgactttctgtaactttcgtacctcgtctcgttttcaaagccacgtgcagaagcgctgctcttgctcctggcagctctcctcttggtggacttgtgcccctgcctctttagtctttcctcttccctcataatcggcgtatctccctactactctgccccgttttatggacaaaactcaattctgccagaaattcatgcgtcaccaaaactgtctgccatacttgtacggttacctcctacagcacagacactcacctactcctagtcatatactacgtttgctagtaagtaataatatctgtttactataagacggtaatgtgtgcgtgcagacgccatagttacttttgggggctgtttcacagggcgcagaattctacgtcgctggtttttcttaacattttattcactgcactctcttctgcatcatggctcctgaggaggatttgaatgtggttcttatttttgctcctttacaggtgagctctttctttccccctctggcttttctcaggtgtgttttttttttttcctgtgattttctgtagtttaaaaatgatatgactaagtataacttttttggcatttctattgcctgatgttctctaagctttctggatctttggttggttgcctgacaaactttgtggacactcacagccattgttgtttcacctgcttcctctgtccctttcttttttctccttctgcctttcccagtgcgtggctatgaggccatttacagttgtcctccagctcttggatcttctcttatgcttttcctgtcttttttctatttgcttttcagtttggggagtttctattgaaataccctcgacctcagagattctttcctcagccatgtccatcaataataagcccatctaagacattcttaatgttacagtattttttatctccctcatttctttttttttttctttagaatttcctcctgtctgcttatatttcctatttgttcttgcctgctgtctactttattcattagagttcttaacattttaatcaccatccctggtggctcagacagtaaagcctctgcctacaatgagggagacctgggttcgatccctgggttgggaagatctcctggagaaggaaacggcaacccagtccaggattcttgcctggaaaatcccttgtacagaacaacctggtaggctatagtccatggggtcgcaaggagacattttaatcatagttattttaaatttccagtctgatcatttgatcattccagtatccctgctatatccgagtctggttctgatgctttgttgctctctctcttcaaactatggctttttgcttcttgctttttgagtacatcttttctttattcattttggatacttgggcatattgtgctgggtgaaagaaccccaaaaataggcctttagtaatgtgataagatgtggaggagaggaagcattctgtagtcttatgattagttcagttcagttgctcagtcgtgtccgactctttgcgaccccatggaccgcagcatgccaggcctccctgtccatcaccaactcccggagcttactcaaactcacgtgcatcgagtcggtgatgccattcagccatctcatcttctgtcgtccccttctcctcccaccttcaatctttcccagcatcaaggtctttccagtgagtcagctcttcacatcaggtggccaaagtattggagtttcagtttcagcatcagtccttccaatgaatattcagtactgatttcctttaggattgagtggtttgatctcctcgcagtccaagggactctcaagagtgttctccaacaccacagttcaaaagcatcaattctttggtgctcagctttctttacagtccaactctcacatccatacatgaccactggaagaaccgtagccttgactagacggacctttgttggcaaagtgatgtctctgcttttgaatatgctgtgctgagtaggtctcagtcatttagtaagccggggcctctgggctctgaatttgacacctgcctctcagctgcagccccaccttagggtaggacaggaaggctggagggggctaggatgaggtccttccctccccaggtcagttagactctgagcaggtcctctgatcagtgtttctcctgagggcagactgtgtgagaacagcatgccccggtgtacttcagccggctcctttccctctgcccctgtccgagcatgcctcctcatgggagcagcagtccaggaaagctggcggaaggctaggttggccactgagccctgggactgggtccccttggagactgtggctcctggcgttgtccacgccgggcctctaacggttcggctgcagttacagtttcctgcccctgcgcttgttcctgtgggtttccgctctgaattcacctctcactctctccaatctgagaggagcagtttgccctttgacctcatttcttttaaagagctatgaaaaagttgatttttttttttttcagtttgttcagctttttatttgttgttaggacagagtagaaacttcaaaaattcttacatgctggactggaaactacaagttcacttgcctagaattaatgcagccccagaattttagttttctccaccatcagcataggctcgggttagccttggggaccaaaccaaaacattcacctttgggagtttggttgttttttttgtttgtttgttttaatatgaattcatgttaatccacacctccctattctatgcatagtgtgcaattgtaaaacattttaacctaagtgcatacgctttttttaatctccattaaattttcttctctcacttacttcccgtgctgcccagttgagagtattgtagactttgttttatccgattggtctcacgttcataagcacatgttctctttcttcaggtcatgaaactgtagggttttctgtccaaaaggagcacagtgtcatacacctcagaccccttggtttaaagatgaggaagttaaggtccagacaacaggctaagtaactcttcccaaattacataactcaatgacagaggattatgaccttcaattttaacaaaatactggtgaacttttcacaggtctgtgaatcgtctgaggagtgcaggaagattcagcagtacacatgaggtgcagctgttcagatacaactaagggtgtattatactcactgacactttgataagacctaatagaggtcagcacttcaaacaagaaataaagctgtcttgttttttaaattagtttttattggggtatagctgctctacagtattgtgttcgtttctgccggacaacaaagtgaagcagttatacgcatacccctctttttaagagttcgttctcctttaggtcaccacagcactgagtagagttccctgtgctgcacagtaggtcttcattcattatctattttagacacagtggtgtacatatgggcttcccaggtgtctcagtgggtgaagaatctgcctgcaatgcaggagcaccagaagacaccccctccagtgcttttgcctggagatcccctggacagaagagcccggcaggctacagtcccctgggtcgcaaagagtcacgcataacagaagcagctcagcacacgcgcgtgcacccggtgtacttatatcagtcccagtctccagctcatcccacctgcccttccccgcctggtatccgtaagtttgttctctgtgtctgtggctctgtttctactttgcaaataagttaatctctgtcatttttctagattccacatataagtgatgttatgcaatatttttctctttaggacttacttcactcagtatgacagactgtggggctgtctgtgcaaatggcacagtttgggtcctttttatgactgaataatatcccactgtatgtccgtatccacctcttctttatctgctgatggacatttaggttgcttccgtgtcctggctgttgcacaccgtgctgctgtgaaattggggtccatgtatcattttgaattatgattttctctggttacatgcccaggaatgggattgctggatcctatggtagttctattagttttctgatgaacctacaaactgttctccatagtgactgtaccagtttcattcccaccaacagcttagcgctcccttttcttcccactttctccaacgtttattgtttgtagcctttttgatgttggccattctgaccagtgtgaggtggcacctcattgtagctctgattttcattgttctaatgactagtgacgttgagcaccctttcatgtgtttgtcggccttctgtatgtcttctctggtgaaatgtctatttaggtcactggtccgtatgttgatcgggttgtttgtttttgatatagagctacgggagctatttgcatattttggagattactcccttgtcagttactttgtttacatccattttcttccattctaagggttctcttcttgtcttgtttatgatttcctttgctattcaaaagcttttctaagtttagttatgtctcatttcttaatttttgtttttattttcattactttttgagttgggtcaaaaagattttgctgcaatttacgtcaaaatgaaaggcaaaggagaaagggaaagatatacccaactgaatgcaaagttccaaataacaaggagagataagacagccttcttaaatgaacaatgcaaagaattagaggaaaataatagaatgggaaagattagagatttcttcaaaaaaattagagataccaagagaacatttcatgcaaagatgggctcaggaaagtacagaaacagtaagaacctaacagaaacagaagatattaagaagagggggcaacaatacacagaaaaaccataccaaaaaagtcataatgacccagatagccatgatggcgtggtcattcacctagagccagacatcctggaatggaagtcaaatgagctagtggaggtgatggaattccagctgagctatttcaaaccctgaaagatgatgctgtgaaagtgctgcactcaatatgccagcaaatttggaaaactcagcagtggccccaggactggaaaaggtcagttttcattctaatctcaaagaagggcaatgccaaagaatgctcaaactaacacacagtttcactcattttacatgctagctggcaaggtaatgatcaaaattcttcaacttaggcttcaacactacgtgatctgagaacttccagatgtaccagctgggtttagaaaaggcagaggaaccagagattgaattgccaacatccatcggatcatagaaaaagcaagggaattccaggaaaacatctacttctgctttattgacaacactaaagcctttgactgtgtggatcacaacaaactggaaaattcttacagaaatggaaataccacaccactttacctgctttctgagaagcctgtatgcaggtcagaaagcaacagttagaactggacatggaacaacggactggttcaaaattgggaaaggagtacatcaaggttgtgtattgtcatcctgcttatttaacttctacgcagagtacatcatgctaaacgctgagctggatgcatcacaagctggaatcaagatagctaggaaaaataccaacaacctgagaaatgcagacaccactctagtggcagaaagtgaagaggagctaaagagcctcctaatgaggtgaaagaggagagtggaaaagctggcttaaaactctacattcaaataactaagatcgtggtatctggtcccatcagttaatggcaaatagatggggaaacactggaaacagtggctgactttattttggggggctccaaaatcactgcagacaataactgcagccatgaaattaagatacttgctccctggaagaaaagttgtgacctagacagcatattaaaaagcagaggcattactttgtcaacaaaggtctgtctagtcatgaccagtggtcatgtatggatgtgagagttggactgtaaagaaagctgagcaccgaagaattgatgcttttgaactgtggtgttggagaagactctcgagagtcccttggactgcaaggagattcaaccagtccattctaaaggagatcagtcctgggtgttcattggaaggactgatgctgaagctgaaactccaatactttggccacctgatgggaagagctgattcattggaaaagaccctgatgctgggaaagattgaaggcaggaggaaaaggggacaacagaggatgagatggctggatggcatcaccaactcaatggacatgggtttgggtggactccgggagttggtgatggacagggaggcctgacgtgcttcagctcatggggtcgtaaagagttggacacgactgagtgactgaactgtactgaacctgatgcaaagagctgattgatgtgaaaattctatgattctgggaaaattttaaatcaggaagagaagagggcaacagaatgtgagttggttggatggcatcactgactcagtggccatgagtctgagtaaactccaggagatggtaaggacaggaaagcctggcatgctgcagtctgtggggtcacaaagagtcagacaggacttagcaactgaacagcaacaaatgtcagatagtcttctgcctgttttcctctaagagttttgtcgtgtctggccttacatttacgtctgtgatccattttgagtttgtttttgtgtatgatgttagggagtgttttaatttcattcttttacataatgctgaccagttttctcagcaccacttattgaagagacatatcttttcttcattgtatattcctgcctcctttgtcaaagatgaggtgaacacgggtgcctgagtttatctctggactttgcgtcctgttccatccatctgtatttctgtttttgtatgagtaccatactgtcttgattactgtatttatgtagtatagtctgaagtcagagagcctgattcctccagctccatttttctttctcaagattgctttggctatttgaaattatacaattttttgttctaattctgtggaaaattctgttggtgatgtgagagggattgcattgaatctgtagattgctttcaatagtatactggttttcacaatgttggttcttccagtccaagaatatggtccatttgtttgtgttgtctttgatttcttacatcggtatcatatagttttctgtgtacagatattttgcctccttagataggcttattcccaggtgttttattctttctgctgtagtggtaactggggttgtttccttaatttggctttcagaccttccattgcagcatataggcatgcgagagaatctttcagacctttcattgcagcgtataggtgtgcgagaggtttccgtgcattggtttcgcattctactgctttgccagagtcgtcgtttaactccaggagtgttctggtggcaagtttaggattttctgtgtgcagcatcacatcatctgtggacagtgacagttttgcttcttcttttccaatatgcactctttttgtttccttttcttctctgatctctgtggcaaggacttccaaaactatgctgagtaagagtggcgagagtggggaatcgtgcctcagaggaaacgctttctgtttgtcaccgttgagaagggcgtttgctgtgggtttatggtttatagcttttattgtgttgaggtaggttccctctatgcccgctttctggagagcttttatcatgaatcagtgtttgattttgccgaaagcttttcctgaatctaatgagatgatgatatggctcttattcttacgtctgttagcatggtgcattatactgattgatttgcgtatattgaagaggacttgcaccctatctgaccatggtgtatggtcctcttaatgtgttgctgaattctgtgagctcgtacttcgctgaggatttttgcgtctgtattcatcagtgatactggcctgtaattttctatttttgtgatatctttgtctggttttagtatcacggtgatggtggcttcatagaatgagcttggaagtgttcctctccctgcaattttggaagagtttgagaaggatgatgttagctttctctaaatgtttgatagaattcacctatgaagccatctggttttggacttctgtttgttgaaagatttttaatcacactttcaatttcattgcttgtgattggtctgttcatattttctgtttcttcctggttcagtcttgaaaggttttacctttctaagaatttgcccatttcttccaagttgtccattttattggtatgctgctgctgctaagtcgcttcagtcacgtccacctctctgtgacccatagatggcaacccactaggctcccccgtccctgggattctccaggcaagaacactggagtgggttgccatttccttctccaatgcaggaacgtgaaagtgaaagtgaagtcgctcagtcatgtccgactcttagcagccccatggactgcagcctaccaggctcctccatccatgagattttccaggcaagaggactggagaggggtgccattgtcttctccgttattggtatgcagttgcttgtaatagtctcttatgatcctttgtatttctgaggtaacaattgtaacttctcccttttcattttctagttttattgatctgagtcctctccctctctttcttgaggtacctggccaaaggtttatcagtttttttcaatcttcccaaagaaacagtttttagtttcattgatcttaagaaaaaaagttttcctagaacaacttgtttttagtgaaccagacgggctgcttataataaattcaaccatttccaagtagttagtaaaaatatttatataaagcagcttatttaagtttggtttccacaattcctttgaaaaaaattggagtatttcgttatttccattattcagatatttgattctgtttccatttaacagaacaaaatgagtaacaaacaaaatcaacccaactagctgcagctttaaatacaactctaaagaacagttgaatcacagactgtttgaaattggaggaaaatctatgatgctgtcgctttaatcagatggaaatatgtagctttaagtgcttttattgggaaaaaaagaaaaatgattgaatggatggatgaaccaagcattcaacctttggggacagagatgaaaataactaaaaatcagtttaaaactcactcttgacaaaaatataagcaagcatctaacaaaatgttattacagaaggagtgaggtaaataaatattagatacttaatattagacttaaaaaataaacctctaggtaataaggaaataaatcagggtggtgtcaagatttggataccagaaaggaaagtttgtgagggatttttacagagacagtacttttaaaacaaaaaaggcttagagaactttcacagggttaatgagaaaagctcatgatcctggtagtaaggaggcattggagaacttaggagctctttcagtaaatggaatgcaggtacaaagctaggctgcaggagatcgagttggtaaaaagaggcagcaagagtcaccgtttccggttttccagaaattcaataaaaggggcccacccatgaagccaggtcaggttctggtacagtgttttgaaggattcatggatcttccaaaaaatgcctctgttgctgctgatttaacctgttgaagaagcttgtggatcagttttgaagcagtttctttacatggtactatttttaattatagtgtgtagtgaacaacagtactgaaattacatagaactaggcatgcattagatttgatattcactgtcttgttaactccaaagccctcttagccctctgtatacactggtctcatctttattccagtctagtccagtcctcactgtccatcagctctcttgacagctgcattaattttcattcacttagcacctgtgatttaatagccagtagtgcttattgcagattgcctagtacgtcttgggaagaaggttgctgctaatatttaagctctgtcttagccaactttctcataaacattgtcgtgcctgaaacacaatcagtggacagtgtgcttaacatgcgtgccctggaagtgccttggttaagattgtttctctctgaaaatacagacttaccttcactagttgttttctaaataaaatactcttctagaagctctgggtactggatgaggggaaattggttaaaaacaaaaactacacaaaaaaaggataacagtgctcatccccttttcagagctgttcagatgaaaaattgctcagcgtgagcttgatctatatgtttttcctggttattagtagtaatgaagatgcattaaccatagtctcttgataatgcgctagcagtttcttagtacttttatcaacatacaaattttagaactggcaatatgggaattcgactagtacatttttgtttataaaaaagggtaacaacattataacttcttcatatctgtgaattatgaatctcgactttcagacaagcgaaacgagaatgcagtggaacttcaggatcataatagctcttctttcctccaccactgaggagaggggaccgcacacaggctgccaagtgcagtgtcgtgccagaggcaaatgccgtctgagtccataatggatgagtgctttccatgtcgctcattccttttctcaataaacatgtcctgagtgcgttccctgttgcttagctgtaatgtctgtcaattgaaaggctttacttccttaagaagcagctgaaaattacaagtagtgcatcatcactatatatcattatctctattaggaaacattgttattcaacaatttttggaaggacattacatagctaggtgagtgatttctttgaagatgaaataatgcaaataaaccatttggaaaaggatttgtttttcagatttaactgtgttataaatgaatagttctttcttttataaagctgaattccaagcctcccatacctagcctgtaatattagctagaatcattggagaagattttatggaaagaagaagcatagagctctttgatttttactctagaaatctggatcagttatgttttagaactctgtctggcttatctattcagagatctatctagttcagttcagtcactcagtcgattccctgtccatcaccaactcccggagcttactcagactcctgtccatctaatcggtgatgccatccaacagtctcatctgctgttgcccccttctcctcctgccctcagtcttttccagcatcagggtcttgtccaatgattcagttcttcccatcaggaggccaaagtattggagtttcagtttcagcatcagtccttccagtgaatactcaggactgatctccttcagaatggactggttggatctccttgcagtccaagggactctcaagagtcttctccaacaccacacttcaaaagcatcaattctttggcgctcagctttttttatagtccgactcttacatccatacatgaccactggaaaaactgtagctttgattagatggacctttgttggcaaagtaatgtctctgcttttttatatgctgtctattttgatcatagcttttcttccaaggagtaaacgtctcttaatttcatggctgtggtcaccatctgcagtgattctggagccccaaaaatgaagtctctcactttttccactgtttccccatctatttcccatgaattgatgggaccggatgccatgatcttcattttctgaacgttgagttttaagtcaaccttttcactctcctcttccactttcatcaggaggctctttagttccttgctttctgccataagggtggtatcatcttgaatccagcttgtgcttcatccagcccagtgtttctcatgatgtactctgcatagaagttaaataagcagggtgacaatatacagccttggcgtactcctttcccaatttggaaccagtctgttgttccatgtccagttctaattgttgcttcttcacatgcatacagattctcgggagacaggtaaggtggtctggtattcccatctctctcagaattttccacagtttgttgtgatctacacagtcaaaggctttggcatagtcaataaaacagaaatagatgtttttctggaactctcttgctttttcaatgatccaacggatattggcaatttgatctctggttcctctggcttttctaaatccagcttgaacttctggaagatcatggttcacacactgttgaagcctggcttggacaattttgagcattactttgctagtgtgtgagatgagtgcaattgtgcggtagtgtgagcattctttggcattgcctttctttgggattggaatgaaaactgaccttttctgatcctgtggccactgctgagttttccaaatttgctggcatgtttgagtacagcactttcacagcatcgtcttttaggatttgaaatagctcaactggaattccatcacctccactaactttgtttgtagtgatgcttcctaaggcccacttgacttcacattccaggatgtctgggctctaggtgagtgatcacaccatcgtgattatctgagtcatgaagatcttttttatatagttcgtctgtgtattcttgctgcctcttcttaagatcttctgcttctgttaggtctgtaccctttctgtcctttattgtgcccatctttgcatgaaatgttcccttggtatctttaattttcttgaagagatctctagtctttcccattctattgttttcctctatttctttgcactgatcgctgaggaaggctttcttatctctccttgagattctttggaactctgctttcagatgggtatatctttccttttttcctttgcctttagcttcccttctcttctcagctatttgtaaggcgtcttcagaaaaccattttgcctttttgcatttctttttcttggggatgatcttgatccctgccttctgtacagtgtcatgaacctctgtccatagtccttcaggcactcttgtctatcaggtctaatcccttgaacctgtttgtcacttccactgtataattataagggatttgatttaggtcataccaggatagtgtagtgattttcgctactttcttcaagtctgaatttggcaataaggagttcgtgatctgagccacagctcctggtcttgcttttgcttctgcagggtgacaatatacagccttggaagagggttgttggaagagggtgtttgctatgaccagtgcattctcttggcaaaactctatgagcctttgccctgcttcattctgtactccaaggccaaacttactccacgtatctcttgacttcctacttttacatcccagtcccctataatgaaaaggacatcttttctggatgttagttctagaaggtcttgtaggtcttcatagaaccgttcagcttctccagcattactggttggggcatagacttggattaccgtgataaagaatggtttgccttggaaatgaacagagatcattctgttgtttttgagattgcacccaagtactgcatttcagactcttttgttgaccatgatggctactccatttcttctgagggattcttgcccacagtagtagatataatggtcatctgagttaaattcacccattccagtccattttagttcactaattcctcaaatgttgatgctcacttttgccgtctcctgtttgaccacttccagtttgccttgattcatggacctaacattccaggttcctatgcaatattgttctttacagctttttgctctactgagagctctgtctacaagatcccgatgctgggaaagattgagggcaaggcaggaggcgaaggtggtaacaggatgagatggttagatagcatcgcgaactcaatggaaatgagtctgagcaaactctgggagacagtagaggacagggaagcctggcgcactgcagtcaaggggccacaaagggtcagacaccactcagcgactgaacagcagctagtaatggcaaggatacagctggcgcataaaacgtgggagaatcaccttgtacctgctgccagacagacctgagaaaaggaagtgatggcaaaatttaaggtgacgaaaatcaggacaagtggatctctcagatttggtttccagtttcctactcttgtgaaaacaaagctaaatgtgagaaaataagcttctattaatgattggattacatactgatattgattgacacagacaacatcccacaagtaaaatagtctaactggtcctccagataatagacccgagatacttaaagccagtgactcacttgggaagtaatcattcattttaacagctgttgacttggtgtcctttctctgccaggctgagcatcggcgctggcaaaccccggtcgccaggagaggcctgtgtgagtgggaggggagcgtggaggggggcccttgggccctgcagcgcagtcactgtgacctcaggggtgggctgggagcaggggagcacagccagaccgagcgggccgggctgcagcgcagaaagctcactgagacgctttgtgaggagggcgagaccaggaaggaatgagcgttcagaggagggctgcaaacgtgtgtgcacccgagtgcacgcgcagcaggtggtgtgctcatgggagacacgcagagaggagagcacgcgaggcgggccggggctctgggagcagccgtctccagagggccgagccgctgggagcctgcctgtgggcggcgagccgggccggggcccaggtgagaaggatgtgtctgccttttagcaaggataggcagaacacctggtatgtgctggcaacggcgggatggagacagcgtccttgtctccaaggcattttgttgcactggggagtggagagggcagacacaccgggcagaccaggaaaacacgtggtgtgtcgggaaaaggaagcagggccgcaggaggcgggtgtggaggtggggcggcggggagggcagacccgtgatggactctgtgggctggctgcatggctgtcagagacgctgctgtttcagaaccggggaagatgcggccttgggggagacctgttctcccctcactccccttggcggccaccccgggcttgcccagccctgaccgccccttcggagcccgcctcgcaggcttccgtcaccacctacttccacggcagcggaaggagtgtacttcttgcctggactccccagcaggggagctgtgtttcagacaggggcggcgttggcactgttaggccctgttgaataaaggaatgaaaaattccacaagccgcatcttcagaagtcttgcagttggattgtcctgtggtcacttttaagcttccatacctcactctgtgtacctgatctcgtaaatggcccttttcaaagcatgtaagctatgtctttgtatcaacagaatatgtgatattctgatattagagaacagagttctctaatttaagtaatgtgtctccacattttttttttacaggaccaatgccaaaggcgctcccctaaatataaataaggtctcgaacagcttgattaacttcggaaggaagctgatttctcccgcagcggccccaggcggtgcgggaggccccgtggcagtgggcagtggcggcaccccctccccggcggcggctcccaccaggaccttggcggaggcccccaggcacgctctgcagcagcagcagcagaggctgatgaaatcggaaagtatgcccgtgcagctaaacaaaggtaagggaggatgctagaacctgggccttcctcacctgacttcgaggaaccaccatcctagaacgagggactaatgcaaaacccaactgtaaaacatgttagattgtttttaagtgggaatttcagatactgtactgttcttaagaactttttacgagctaatttgttaaagtactttcttaacatttctgcctcagtgtgcttgcatttgagtcgtggtcacgcccaccgagcgtggtgtgaatagcagagagcttgtcacagcagagagcttgaggctgtagaccgaggtgtctgccaactttgtgcagtgatgcctctggctaggagagcgttggcaaggggcggcctgggaccctgggctctgccggtcccagcttttacccctgcggttggtttggaggaggcaggtcaccaggcttgcgtcccatcgaggagcacaaagcagagccccgaatgggggacggggcaggcaggatgcctcgcgcagccagggcctgtgtccgcgtcagggcaccgggagaggcggagagcgtgagaccggctcttggtgtgcgtggccccggggctgtgccggcgctggggctcggggaggcgccctccccttcaggggcttcccagcacttcacctcactcattgtgttcataagagagcctttcaggttcctacccagaactttttctcatattttccacttacctccaaagatgtgtgaatcaaggcagttagaaacagctacatttattcttagctgtgggctctgctgtctgtattccggaagcatgagatactaacatgatggcagaaaatctacagaaatcaatcctgaggcctcacaaagcctggagtctgtggctatttagtgtcggagcagatgccctcttgacccctgcctcatccacatcgtaaaggaatcatagcctggatcatagccaagttcagtacccaacactcagtgttgacaataacaataatatattgaattgttaaatattaacccatgttccatatactctgtttaagacgattgcatccaacgttaccaaaattttaattactggtatttaaactggtaaacttaagttaaatagactctatatgccaataacagaaaacaaactgtgtgtgttcaacaatcatcagtgtgcttctattagttacatttatctgtcattgcctatatgaagtattagactttatataatggctgtttaaatttctattataatattccatttaccttacataggaacatcttttaatattattacactcttctctttttaatgcagagctatcacacgtgatttaaagagaaggagactgcaaatccataaatgtattttaatgccaggagacatgcccacttccaggatggaaatgaatgttattttatatatttcttaattgtactgttttattgttctaaacaaatatgatttcaatattgctttgataacaagccatagttagtagtaattctaactgatggcaggcaaatgagtcagagaatctcttaatgccgtagcttaaattttctgaggaaccaagccaaatgacgatagaaatataaagttgtgtctctaaggaaatgtcaagtattaatatcacagtgagtgagaaaggaagtacatgaggactgaacaattgatgaaaactaagtcccgagttagaaggaagcaacagagcacttaagcagagcatttggaacaggagcgtcgctggggcattccgtgaccggtccctgtgcaaaacggaagcgatcttgtttggcagctcttcgtttcatttctggtttattcttctcacgccaacctacagaaagcttctctaccttcatattaaagatgctcggtctgtcggggcccctccctgaacaaaggttttaataaaataggccaaaaggtgaagagagcagtttgtactggtagaaatggggtaggttgatccttcacttgctctccagtgaaccacaggcagaatccggaaactttctgacccttttccccatccggaaataaggggtttgacctgacccctggggagcatgccagctctgcacacctatggttccttagatgaaaggtgtgtttgttaactctcctccagtggcggttctttctgtgggcgtttcccgccagtgtcctgccgcgccccgatgctgacctgaacctgctgtgtcccctggcccggaagggttgagcacagtgctgactccttcccaagacccacgctgggacagggcttctgactgtctcggaacagccctgtgcttcatgcctttttaaagtgcactctgtaggaaaacttgaaccttgtttcgaaaagcggttgtttatgcagctgaaaacccttaaggataacccttatgggttagttaactctcaattatctctgctcatatagaggaagagttctatgagaaagccagcattcaaatatctgttatttgaagtgcattctgccgtgagtatctgtgttgggggtggggtcctgaaggaaggagggagtgcagatggtcctccaccattttccaggtgacatcagtattaaacttagcttcagtctctaaatatacattaataggtgatccagaagctgccgagtaaaacgagtagcaagtgtaaacttgaaaatcttcgagtgtacagaacgtgaggcacactgcttatcagtgaatagagacttaactggattaggaaaactcaggacctgggaagttccactaaaagttgtttatcagttatttggagtatgtacctatttacagattttatttcagctatgggagaatataaatgcatgtactgttaattgataggaatggtctaattacaacccagtagtttccagatgagctgtctgtgctgtaaatcatcattgtagccagtggtcaaggcactgaaagttgttatataattcaaaatttgatttttttttttttgctaatgtataggagctacagggaaagcagatatgttaattatgtgttatcatacatagaaaatgtggtgccttttaagaaggcttgtttttcagcttgttagtctcaaaatagcacaaggcttcagatgctgacctgtccaggagagggttcggttgacagtggctgtacttcatggtgagctttgtcatccaggaaggaaatcagagacccccacaaaccttgcttctcagtggccctggaccccaggtgcttcccggcacctccttttccttgctctcccgtgtcctgaaaacgcactccctgacccccttttccttgtatgcttttttagtttgagcacttctttattttaagcatttactacaggtccaatttgtaaatgaaatcttgcctatagtaagtatatcaagtttaaagggtatgcagttcacagatttatttttacatgttgacatttataagtgcatgtggtaacttatgaaatcttttcagtacttaatatgaaatcagaacttgtctaggtctttatcttatcactgaagaaattggtttcaagtttcgttaaaaataaattttgtctgttacaggaggaaatcaatttcaaaggaacatctctacttcttaattaaatacatagatacttttggataaagaattttttaaataagaaaatgtaaaatcatgctgttatttgtaggacaatgaaatctgctcagcagtatccattgatggctagtttcctgtactttagacctgtagaaactttttttttctcaagaaaaacaggcacaaacttttaaggaaacaccttaaaaattagttccttcaagaaatactttatattaattattctaagattgtgttatagtttgattcactgtacttttagtaattaggttgataggtaaaagtattatagcattaactatgaaagaaaagctaatttttttcctctttatgaaatctaattattttttcttatgaaatccaggcaatgtagttacaggaagcgatgctcaggtttctgttcctgtccagaccctaactcgcctcccaggtacagttaccatggcaacgcaggatctctttgcctgcagtctcattgcctcctcccaaactccgttttcctttttgccacccaccattcacgctgtttgccagctcgctccattgttcaaccactgagtggcactgttgtttaggacaaaagtcccctctcccgtcataccttgctagcaccaaagctgactgcagtctggtttttaatatttctttaactgagtttgtaccagtctctttccttgcaatatgcggcactctagattctgtggttcttttaacaccacattgtaactgacagttcatgctgaggtgttttcccgttgacgaggtgctctgtgataggatttgacagattagcgctgaggttaaacacctcagatgctgtgtatctgcttattattgtatgtattagccagaagtacttattatattttacagagaagaattacaacttgatttcaaaatttgtttctaagtacaggctttgtattatgagtcattttaacagaattagaattcagcgtgacaaatctctatgtacagtaattggtgatgatttaaaataaaaagacagtatttaaatatcataaccatgtgtccaaaatctagaaaaagtttatttacgaaatataaaacaatagtaatccatattcagcacctcctatggaatttagacacatatatatttaaagttgctgcatttatcttttattacaaaatcttttaaaatattctgtagagagaaagtctgtattaaatggaaggctagactaactttaagaatcctcccttcaaattcagactaaaaagaggacagtattaatagaaattcataaatgtcttccttagtttaaaatatacgcacagtagtcatgctgctagcattaaactgctgttctaataatgacatgtctctgtaatatctgtgctttttaatagcgtaacagaaaataatacgtcatggttaggacatgagtggtgtgttgacttaacgtgttaaacataccgtgggacagaggggtgtgatcttgcttctgtatatagttctgcgtttccctggtagggtttctggctgtgttctggtaattgacccgctgacctttaggcttttggagctctcagagtctgtgaaagctgccatttactctgttcagtgacctaagtaataacgggctgctgtggcgttgccggtacaggaggcagatcagcgactcctctttccccttgtcagttattgcacctacgtgaatgttgatgagattttctgacctggtgagaagtcacaggacttaaatttgtttccttaaaagttttttttttttttttttggctgtaccacacaacttgtgggatcttagtttcttgaccagggattgcacctgggcccacggcagtgaaaagcacgaagtcctaaccactggactgccagggagtttgccccaggcagatgtttaacaggcgttctgttgtggcagggttagtttgctgcagagtgtatctctggctgcgaaagcctgatgggtttatacctgtgtggaaagagaaagctaaaggctgcttcctgttctgacttctgcttctacgctcctgctcaatccatgttttccagtagacacgtgaacagcgtccctttttaaacagactcttaaagaaggcgatggcagcgttttgttcagatgacttgcattagagaggtgggatcgcctccctccctcactgagcacgtgccggaagcctgcagtgcgcccttagagaggtgggatcgcctccctccctcacccagcaagcacgtgctggatgcctgcagtgtgcccttaagagaggtgggattgcctccctccctcacccagcaggcacgtgctggatgcctgcattgtgcccttagagaggtggcatcacctccctccctcactcactccctgagcactgctgcctacagtgcaccaggctctgtcttcaccagtcccttggcctccctcctgcttcgccaagctgcatgggcatcaccggtacttcagatgactcgggcaagtccacctggtcaagagccagctctttttctgagcccctgttccctactgccctgtctgccctgcccagcaggactgtatcagtctcacagggaagggtccagcggcttaatgagacaggaggccagatgaacagctttcccctgcagtggacagtggggcgagccctgccccagtttggagaggtcactgtgggtttgcctcaacccagcacacttcctacagagtgtcagagagcaaggggaggtagaagggacccaaaatagttagtggtggcaacagaaagctttctagcaatctctgctggagagattcttgaggctcagtaatcccagacgttggagaagctcatcagaggttccagacccacaagaatagacacacttttcagggagataaaatatcatgtagactttcctgggtgtcttttttcagagtggtggagcagatttcaagaaatgaagcaaatatcagtatttgcaataattctttaattgtaggtagtcttttcttatcatgaggtcttatatctgtatctttgccttttaacacacaataattatatgggttttaattttttgaagaaaattacaaatataaagtgatatctcacaatccaggccattaaataatttttggaaaattgttggaaagatccgttttctcagtgtaggttgtaatcataaaagacatgccacaggagagtttattcttttgtcaacttaactcaaagagttttcttcaaaattatctttagaaatagcacatatgcccccaggaactttttttgagagatacttaggaattattaattcataaacttaaaattcagaaaactaagatcatggcattcagtcctatccacttcatgggaaatagatggggaaacagtggaaacagtgacagactttattgtttgggctccaaaatcactgcagaccgtgactgcagtcatgaaattataaaagacgcttactccctgaaaggaaagttatgaccaacctagatagcatattgaaaagcagagacattactttgccaactaaggtccatctagtcgaggctatggtttttcctgtggtcatgtatgaatgtgagagttggactgtgaagaaggctgagtgacgaagaattgatgcttttgaactgtggtgttggagaagactcttgagagtcccttggacttcaaggagatccaaccagtccattctgaaggagatcagccctgggtgttctttggagggaatgatgctaaagctgaaactccagtactttggccacctcatgcgaagagttgactcattggaaaagactttgatgctgggagagattgggggcaggaggagaaggggatgacccaggatgagatggctggatggcatcactgactcgatggacgtgagtctgagtgaactccgggagttggtgatggacagggaggcctggcgtgctgcgattcatggggtcgcaaagagtcggacacgactgagcgactgaactgaactgaactgaaacttaaaatataaggacacagacatacatagacattacttcctaagggaaattataatttctaacaactgcagtatataaatattatcatataatggacccttaggaaagaaatttatatttcttaagttagtggcacacacaggcatttttaaaatttgtgtctgtgtctattcatgtttcagatatgagtgaatatgcataaatgtatatgcatagatgtcactatgcatatgatcaggtttttcccttttccgttgtggcttatcacagcatattgaatatagctccctgtgctgtacagtagcaccttgtttatccaccctatagataatagtttgcctctgctcatctcaagctcacaatccatccctcccctgcaccccagcgctgcagccacaatcttgttctctgtatctgtgttgtagataacttcatttgtgtcatatctgagatgccacatgtaagcaatgtcatatgatgtttttctttttatttctgacttagtttgcttggacttccctggtggctcagacagtaaaagcgtctgcctacagtgcaggagacctgggttcaatccctgggttgggaagatcccctggagaaggaaatggcagcccactccagtattgttgcctgtaaaatcccatggacagaggagcctggcaggctgcagtccacggagtcgcaaagagtcggacaggactgagcgccttcactttacttagtttgcgaatctgtaggtccatccatgttgctgcaaacggcattatttcattccttttatggcagatgtcaccatcttagttttttgaatgctgagttttacaccagctttttcattcttctcttgcacctacatcaaaatgctcttcagttcctctttgctttccgccataagggtggtgtcatctgcatatctgaggttattgatatttctcccaacaatcttgattccagcttgtgtttcatccagcccagcgtttctcatgatgtactctgcatagaagttaaataagcagggtgacaatatacagccttgacgtactcctttcccaatttgaaaaccaatttgtggttccatgtccagttttaactgttgcttcctgacatgcatacagatatctcaggacgcaggtcaggtggtctggtattcccatctctttcagaattttccacagtttgttctgatcgacacagtcaaaggctttggtgtggtcaataaagcagaaatagatgtttttctggaactctcgtgctttttttatgctctgacagatgttggcagtttgaactctggtttcctctggcgtttctaaatccagcttgaacatccggaagttcatggttcacatactgttgaagcctggcttggagaattttgagcattacttggttagcatgtgagatgagtgcaattgtgtggtagtttgagcattctttggcattgcctttctttgggattggaatgaaaactgaccttttccagtcctgtggccactgctgagttttccaaatttgctggcatattgagggcagcactttcacagcatcgtcttttaggatttgaaacagctccactgggattccatcacctccactagctttgttcgtagtgatgcttcctaaggccgccttgacttcgcattccaggatgtctggctctaggtgagtgaccgcaccgtcgtggctatctgggtcattccactgtatgtatgtatcacatccgccttatccattcatccgtggatggacattttaggttgtttccatgtcttggctattgtaaatagtgctgctgtgaacataggggtttgtttgtttgtttgtttaatagaaaaaggttgaaaaggataaaagtctcccttcccacttaaccactgttgatgtaaaactaaagcgcatgtaacattagacagtcccagttaactaaagggaaaaaagagaaaaaacagctcctttttctcctcctacttccttttgccagcccatttcactacaggtatccattgttaagtttcttataactccttctaggacaaagaaaaaatattttaaactaaggggtaacaggtacctcacgttaatatgctaacacctcgtgtctggagatgacttcactgtgaagcttcaagatgaaagcaaagtctgtgcagtgcaggtgacaagcagtaagtggctgggacagagaagagggaggccagatcagctcgggcaggacatagtgcgacaggacagagagcctgctcctgcccgcagggagggctgcaaagcctcaaggctgtcctggaagatggccacgtagcagtccctgtgcgtgctgttggaaaacgagagtcccgaagcagaacaagcagttccgttgccttctaaataatcgctttaagaagacagaggaatacagactatgtaaaacaaattaaggacactcatcagttaactagaacacgcctcgttttggggaagacttactccaaaagacattgaatgaatgagttgttggatagagaacaaggtcagagttggccctttgccatgagaaggtctcattccacgttcctttcacctgaaggcgcgttttctacagccctttctcagggagcagggcggtgagtctgtgctcagcataggccctggagtcagggctgaggtggagtcctgccccagtcagtgccttgctggatgccccatggaggctgctggacctctcatctgtagagagagcagggacagctgcttcggggtggcggcacctccacgcctgtccaccgcaaggactggagggtgccgcctctcatctgtagagagagcagggacagctgcttcggggtggggacggcacccccacgcctgtccactgcaaggactggagggtgccgcctctcatctgtagagagagcagggacagctgcttcggggtgggggcggcacccccacgcctgtccgctgcaaggactggagggtgccgcctgctgggggcggttgtgttggcggggtcattatgtacctcaagtgcctctttgggcgtcagagtcagccgtgtgaagcaaacaacgcaatgcctctgtcttgtcttaatcacgtgtcctgacggtctgaacccccacgtttgcactttcacacgccagccctggatgaggccgcgcccggcgtctctggtcaggctagaaccgggttggttgcaggcactgcaggccctttgccctcttgcggcaccaacgtgtgtttttcaggagcagaccagagccctcttgctgtctgtcgctcaggcctgtgaggtcatactctgtcaccaggaggggaccagttgcatcctgtgtgctccagggccaccgtgtgacgtccaggcgaccccctttctgtgaccgttgtgctgggcttcctggaggccttgcccttcccgatcctctgagccagggttcccaccagcgacccctagaattcccagcctcctgaatgtgttgccttggggtgtcctgtgtccaaatccccagctggtctcaggttcacggggttcttcccggccattcaggagtaccgctcatcccgtgtccttgtttcctgttgagtttagtgagagaaagttcacgagaatatcacgcatggggcatcgtaggagcttcacctgcgtcccctccctcctctcctctccccagccagcctgcagtccgggtccccgctgatgccggagcagctccttcagtgaactcggctcttgacagataagctccatcaacacgtagcccgtgggacccagaacatttattgaacgtttcagagcggcctgcgctcggagcccgttagcccaggtctgtgggcgtcccctgagcaggtggccgtgggcccgtccaggagagtgccccaggtctgtgggcgccccgagcagggcggccgtgggcctatccaggagagcggccaggtctgaggctggaggatggtcgaggcctgtccaggagagcgcccaggtctgaggctggagggtggcccgtgcccacctgtgctgggttgggggtgcccagtgcgctgtgaatggtctgcgtgtgctgagtccatcgcagatgttcggaccatgctaagcccttcccacgtgtccaccgtgggcacccagcacatgtgaagggctcgcctccccaggggggagactgtggcctatggagggtcagggacttgagggccccacggctagacagcagcggagtcagactggaccccagctgtgtccggctcagcaggtgtggatctgagggattctgcttggcaagccgctcgtgcatcgcccacaaccgccccagctttagctgaagccctgagatctctcgggggcccagcgcaggaggcgcctcgtccagcccagctccggtcatcctgagaccacgtccctgcctccagcctgcagtcccgcagggctgctgaccagagcagccaggcccctgcctgaggacacactctgctgggcccagcgggcctgtcctcaccccgccgtccctccctccctccctgccccagagccgggtgaccgggaggacagagcccacactgagggtgccagcagcttctgaaaggaatgtgtgtgcccccgtccccccggcctgcgcccctcctccccagcacagccagtgagatcgctgtcaggggagagaccgccctgccctgcgctgctcgtgcgggtggcggtgctcctttcagtgccacgcggatggcagggagccccgaggggtcgaccaggctttgtctcatcaaggtgtgcccagtagtctgcctccgaaatactctttcctgcagaaaactgaccttccctgaaccaccacccgccctcttcagatgtagctccgatctgacggcctgagacagggtcgggtggtccctcctctgagctttcgttggctggggtcggaggttagtcggtgtgtgtgcaaggcctcgtctctcctgagctggtgtttcagaagctccttacgagctcctgtggggccgtcctcggggccgacagactttctagacacatttcctaccgtcagcccacgtagggcttgttccccgacgtttgaaggaaagactgtgcatgcctgctgtggcttgaggatatttagtatattcaagagtgacttaccgtgtaattatgaaaagccattctgggtcaggacttcagaccttcgtaggacgcttctgggggagtgccctaaggagcaccctgaatccatgaggagtcaaagcagcagccttgagctgcgggagggggtgaactccgtgctgttgctgctgggacccctgaggccaggacagcgctcagaggccgtcgtgagaggggaccagcccgggcctctgttggcccaaaccagccccgggtgcagctgtccgcagggaaggggcgtgctcttgatagagcagttcttttcagctgggactgtctgcagagaggaagccacaggggccgtcggcatctgagagaaagcgtgcctcagtgccgctggagtcctgcccagctctgcgtggtgaacagtgtgcctccaggcgtgagcatcaggccccggcgcccgcggacatggagtgagcctcaggccccggcacccacccatggcccggcgcgcccacgcacgtggagcaagtgtcaggccccggcgcacccgtggacaagcatcggtcctgtcaagacaccgtgcagcttatgggttgcaggcctgttgacccggactcggccgggatctgtcctgcggggcctggctggagaaacatctcatccatccaccagacgttgtcctgagcctgtgtgctagcccttgaaagggcggagaggctgaaggcccttccttctgtctcacgtgctggtgactccagcttcttgaggtctaagtgtttccattctcacagggcacagaaatgttagccagtttctgtaacagaggagaaacgtattttagtacacagtttttatatgcgatacacgccacatggtactgtattaatactaccaccagtttggaatttgttcattctgagataaattctgaaaagagctgacttaatgttatctctgaaaagatagttggccaggcagaataaaagctacaaaagaaactcatggagaacagaactttcagatcctctctgcattggataaccggatacatattctcacacagtaaatgactgataagctgatttgttaaagcaggtattcaaaagattttgcctagatatgttatcatcttattttgttatgatggttattttatgtaacagtctacatgttgtgaaaaaatttggaagtttagactgttaggtggattatacctgtgctgtccagggtggtgtctgtttgctacactgggccttggagcactgcaacaagcatgcactgggttttcaaggcttcgtttcaagaaatgagtgtgaactatcgtggttctattttgatgacgtgttggaatgatcatagtttggatgtttggtgaagtaaaatatttatttaaattaattttacttgtctttagcgtttaaccatggatacgagaaaattaaatcggcacaggtggcctgcgtgctgtctgtcgagcagcggcagttcagtcagtcccctgcaggtcttccatgcggaacatcagcagaggttgactgtcaccccgccatgtaccacccaacaggagaagctgtgacgggcacagcccctgcccttcctgaaatctggtctgtaatatcagcagcagcgctctaactgaatacaagagacctgaccatccatctgtgtttccaggaaaaagcatttcaaagtgtgtgtgtatcctaacaattgagtagacaggcctcagcctctccccagatcgaatcgctccttagcgtcaccctctctgatacagaagggcagtaacgtgttggtttagtccttaagtttggacaaaccgtatgatactgctagctatatatataaacactgtttcctgggcatagacttgattaaactctgtaagcctcagttttctcataatgtcattagtatcaaatgttatagcgtgtaaaggtccatacatgtccgtggactaagcttttgtaaacatcactttgctgaggggtattttaattttctgatttcttctttgggtcaccagactaaggaagtatgcatatagtaaaggttcaggaatggtagatggctataggacagataaaatctaaaatccgagttttcttgattttattataatttcaacgtggaaacagttgatttctataatagggatcacgtcttaagattttttcccttgataacgtgtgtgtgtctgtgtgtgtgtgtgtgtgcacacacatgcactcatcgtgtctgactttttgccaccccgtagattgtagctgccaggcttctctgtccatggagttttccaggcaggaatactgcagtgggttaccatctcctcctccaggggatcttcccgacccggggtttgaacctgcttccctaccatctatcctgcattggcagactggttctttaccactgcgccacctgggaagcccattaatgtttgcaatttcttttaaatagaaaaatttcccaacagctttgatggaactttactttatattataaatgcctaacagagataccccctaccttattttcagatagtaatcaaaaaaactaaaattttataagattttatatatataattgcttacaactatgttttttttttcatattgaaagataaattgggaggagggagttgttgtagtccacaaaattgtaagtcttcagttcagttcagttcagtcgctcagtcgtgtccgactctttgcgaccccatgaatcccagcacgccaggcctcgctgtccatcaccatcgcccagagttcactcagactcacgtccatcgagttggtgatgccatccagccatctcatcctcggtcgtccccttctcctcctgcccccaatccctcccagcatcagagtcttttccaatgagtcaactgttcccatgaggtggccaaagtactggagcttcagctttagcatcattccttccaaagaaatcccagggttgatctccttcagaatggactggttggaactccttgcagtccaagggactctcaagaatcttctccaacaccacagttcaaaagcatcaattcttcggcgctcagccttcttcacagtccaactctcacatccatacatgaccacaggaaaaaccatagccttgactagatggaccttagtcgggaaagtaatgtctctgcttttgaatatactatctaagttggtcataacttttcttccaaggagtaagcgtcttaatttcatggctgcagtcaccatctgcagtgattttggagcccaaaaaataaagtctgacactgtttccactgtttccccatctatttcccatgaagtgatgggaccggatgccatgatcttcgttttctgaatgttgagttttaagccaacttttttactctcctctttcactttcatcaagaggctttttagttcctcttcactttctgccataagggtggtatcatctgcatatctgaggttattgatatttctcccggcaatcttgattccagcttgtgtttcttccagtccatcgtttctaatgatgtactctgcatagaagttaaataagcagggtgacaatatacagccttgacgtactccttttcctatttggaaccagtctgttgttccatgtccagttctaactgttgcttcttgacctgtatacagatttctcaagaggcaggttaggtggtctgatattcccatctctttcagaattttccaaagtttattgtgatccacacagtcaaaggctttggcatagtcaataaagcagaaatagatgtttttctggaactctcttgctttttccatgctctagcggatgttggcaatttgatctctggttcctctgccttttctaaaaccagcttgaacatcagggagttcatggttcacgtattgctgaagcctggcttggagaattttgagcattactttactagcgtgtgagatgagtgcaattgtgcggtagtttgagcattctttggcattgcctttgtttgggattggaatgaaaactgaccttttctagtcctgtcgccactgctgagttttccaaacttgctggcatattgagtgcagcactttcacagcatcatctttcaggatttgaaatagctcaactgaaattccatcactagctttgttcatagtgatgctttctaaggcccacttgacttcacattccaagatgtctggctctagattagtgatcacatcatcatgataatctgggtcgtgaagatcttttttgtacagttcttctgtgtattcttgccacctcttcttaatatcttctgcttctgttaggtccagaccatttctgtcctttatcgagcccatctttgcatgaaatgttcccttggttatctctaattttcttgaagagatctctagtctttcccattctgttcttttccttgatttctttgcattgatcgctgaagaaggctttcttatctcttcttgctattctttggaactccgcattcagatgcttatatctccttttctcctttgcttttcacctctcttcttttcacagctatttgtaaggcctccccagacagccattttgcttttttgcatttcttttccatggggagggtcttgatccctgtctcctatacaatgtcacgaacctcattccatagttcatcaggcactctatcagatctagacccttcaatctatttctcacttccactgtataatcataagggatttgatttaggttatacctgaatggtctagcggttttccctactttcttcaatttgagtctgaatttggcaataaggagttcatgatctgagccacagtcagctcccaggcttgtttttgttgactgtatagagcttctccatctttggctgcaaagaatataatcaatctgattccggtgttgaccatctggtgatgtccatgtgtagagtcttctcttgtgttgttggaagagggtgtttgctatgaccagtgcattttcttggcaaaactctattagtctttgccctgcttcattcctcattccaaggccaaatttgcctgttaccccaggtgtttcttgacttcctacttttgcattccagtcccctataatgaaaaggacatcttttttggatgttagttctaaaagatcttgtaggtcttcatagaactgttcaacttcagtttcttcagtgttagtggttggggcatagacttggatcactgtgacactgaatggtttgccttggagacgaacacagatcattctgtcgtttttgagattgcatccaagtactgcatttcggactcttttgttgaccatgatggctactccgtttcttctgagggattcctgcccacagtagtagatataataaaatttaaatgaatctacttggtattttagagtaatttagaatctgagctatcatgtcaaatgatgaaattgtacagatcattgttactgttcagttgcccagtcgtgtccacatctttttgaccccatggactgcaggacaccacgcttccctgtccttcaccatctcccagacttggctcaaactcatgtccactgagtcagtgatgccattcaaccatctcatcctctatcgtccccttctcctcctgccttcaatctttcccagcatcagggtcttttccaatgagtcagctcttcacatcaggtggccagagtattggagcttcagcttcagcatcagtccttccagtgactattcaggactgatctcctttaggatggactggttggatctccttgcagtccaaggcactctcgagagtcttttccaacaccacagttcaaaagcatcatttctttggtgttcagccttctttatggtccaactctcacatctgtacatgactattgaaaaggcatagccttgactacatggatctttgttggcaaagtaatgtctctgctttttaacacgttgtctaggtggatcataacttttattccaaggagcaagcgtattttaattttgcggcttcagtcaccatctgcagtgattttggagccccccaaaataaagtcaaccactgtgtccattatttccccatctatttgccatgaagtgatgggaccagatgccatgatcttcgttttctgaatgttgagctttaagccaacttttttgctctcctcttttactttcatcaagaggctctttagttcttcttcactttctgccataagggtggtgtcacctgcatatctgaggttattgatatttctcccggcaatcttgattccagcttgtgcttcttccagcccagcgtttctcattatgtactctgcatataagttaaataagcaggttgacagtatacagccttgacatactcctttcccaatttggaaccagtttattgttccatgtccagttctaagtgttgtttcttgacctgcatacaggtttcacaggaggcaggtaagatggtctggtattcccatctctttcagaattttccacagtttgttgtgatacacacactcaaaagctttagcctagtcaatgaagcagaaacagatgttttcctgaaattctcctgctttatctgtaagccagcggatgttggcaatttggtctctggttcctcgccatctaaagatggttcctctgccatctagagatcataagtagagtataatttaaaaaaaaaaaaagaagaagaagaagaagaaggagtaataatgagaatttcccacttatttaacaactctggagatgagaggtctgacttaggtctcgccaagcgaaagccgaggtatcgtgaggcctttcggggagaaccgtctgtgctgtcggcagtgttcagttcctcgtgactgtagagccggggccccgttcctccactggctgtcagcagagggccattcgcagtctcgagggtcctcactgcctcgcttccctttctccgtcttcacagccagcaccgcaggccagcgctctgtctgtcttcagctgcctcgttctctggagtcatatctccaacccttcttctgctttcctgtctcactttaaggacccctgtctacactaacccaccatggccacccaggacactcttctcagctcaggttctgaaatcacgcctacagcattgcttctgccctgtaaaccagcacacttacagagcctaggcatgaagggcataggctttatcccacctgccatggctttgcggtgaagacatgaattctcaaatttgacccaggaagaagtaggaaacttttaatggaggaattaacgtagaaaaacgtctaaaagagccgttatagtaataacttcaaaaagtcaccagcactagcaaatgttataggtgaatgacccaaaatttgaagggatggataaatttggttgtataaacttaggaaaagataggaagtttttcatttcattttgtgaaaaagacatcttcttgtgaatcaaaatgctttggttagtttcttagattcctttttgtctgtggacttttagaagtaatttgaaactcaaagctgaacaaacattccttctgttttagctttatcttccaccaccccaaggcaataaaagcttctcaaggagtgcagttccaaggaacaaagagaaaataatcataaaaggaaaaagaaaagcctaggtttatagcacaggcttaaattgcttcccactttatcatcttggataagaaatgccttccttgcaggaccctgaaaacagaagccaaaaagagaacatagacacacacacacaaaggggctgtgttccagaatttaggaagagctccattaagacagtttttcaaaataaaactaacaaagacaattcacataggaccttcagatggcctatattaatatgttgagagttttttttttaagatattcaccctcactagttattaagaaaccttaactaacataatgaagccttccttccatcagattaaccaaataaataaaaatttaatgcgtcacattacttttttgcttgctgctgctactgctgctaagtcgcttcagtcgtgtccaactctgtgggaccccatggactgcagcctaccaggctcctccgtccgtgggattttccaggcaagagtactggagtggggtgacgtcgccttctcctagttttacacttaggtataaacatatattaaacacgtatgtttatgttaaaatcctgtgtgtgtgtgtattgatcgctccgtcgtggactctttgtgagtccatggactgtagcccaccaggctcctctggagtgggttgccgtgcccttctccaggggatcttcaggacccagggactgaactcaggtctcctgcgttgcgggcagattctttatcatttgagctctccgggaagcccatgttaaaaccctaggagaaagcaatttggagccatttatctaaattagactgtacatgccattagacatagcagttgtacacatataaatttatcttatagaaataattatctctacctaaagatgcacctctctagagtgttgtcattttgtttgcaaaggtggaaaattagaaaaatgctaagtatttgggaacactaattttttctcttcacattccttaaaaagggtaaggctgatttttatacaaatcaaaggtaagtttttatgaccaagtaagtccaaaaagtaagttacagaggagtggacttttggaataatggaagaagaacctctgaaaaatctgtttctccacaaataaaatagtaacggcagaaatgccaaagtcagcttgttcagaactctgacagttaaaggactcaatcaatgtgaggagcatctattcaagaaaaaaatggctcagcctcagtaagaatagcatgctttgtaccattttaacttcccctctttccacccagatctgccatagcctttgttgaccagcagccttgcaaccactgggggaaaagaatgagtctagagtaccctgaaagtcccatccccagtaagtggccactagttccagcagctccgtcaaaaaaaatcttgttcttagggcttgtctttatttgactttaatcagaactcacttagaaaccgtatccacagaacatccatcagaaatagtcggtgatccttactgaacatcacggctgccccaggcagaaacggtgcaaaccagagactgaccagaagcttagcaggcaagccggaggccagcaagagacccagaagggaaatctgaggagcggggtgtcccctggagggtttggaaggcgccaggatgttcctaggaacccagaaggccacacatgcaggactgagcacaagcccagggatggcctaagaaactcagtctgtcagatgaacttgagtctctgcacagacaagaaagaagactggatgcgagttgtaagctgcctgaacgcaggcacagagctcccagcaggctcagataccggttcaaggaatttaaggaagggaagtcctgccccttacctgaccacttagctaaccgagcagagacttcaggggcacacaaagcgagaaatatagaccttacagaattagtttagggaagtcactaaaaaaaactgacaagaaaacaaaactggacattgggatgggaggcactcagctctcatcaccgtctaacttttgatccctcccttcctctcgtacccttgatggatctgtcagtaaatctagtcagctttgggtagaatctgaccacttctcaccaccaagctatgatcagttggctgacttggatttttgcagtggcaaaattgttccccgcctcccattctttttttttttttttttgccctttcccacccttaaactgttcccaaagcacccagagggatcctttgaaaattaagtcaagtcacgtcatgcccctgcccaaatcctctagctgcttccactggcttcccttctcagcgtgaaagtcatcaaaacgccacaggtcccccctgccggatgccctgctggctcccagacctcagcccgctcccccaggctcggctttagccgcactggctgctgaccctccaaaccgctggggcctacttggggccttggcacctgctggccctcgtgttatctgcaaagctggtattttcccttctctgagtttttgcccaaatgtcctgcacctcagatctcagtgatgcctttcctgaccatcctgcttcaaactccacaccttcgtcagacactcttggtccccttttctgctctatttgtgcccaccatgttttctgccatgtgatgccgtgtaaaatcgtacgtatgtcttgaatgtacatgtctgtctccgctcactagaaactgggcaccgtggggactgggatttctgacggttagttcctgctgtgtctctgtgcccctgagtgcctggtgctcattattaggccctcagttactgtgggtgaatgagcaaatgaaggagtgagtgctcgccgggcgctgtgccaggcccttcagtccccatcacagccttccggaagtgtccccttggggcccacgagccctgcgtggctctggctgcacctgtcctccgtacccagcaggactttctgggcccgtgctcctgtctgggagcctcactgccccggagcccgtggggaaggccctgcgggggtcacagatgctgcgctgcgacgcggggaccagtctggacgtggacggccgtgtgagcccacacccggccccctctccagatgcttctccctggggctgggggtagcagtgtccctgttttgcaatcaatgaaaatgaaagaggctttttagaaaaaccagtggaggatttatttttttaatttattaataatataatcaccacataattgtttctggcttcttattattaagaagggcttaatagtagaaaggcttccctgataactcagttggtaaagaatccctctgcaaagcaggagacccacgatctgctggagaaaggataggctacccactccagtattcttggacttccctgggggcgcagctggtaaagaatccgcctgcaatgcaggagacctgggttccgtccctgggttgggaagatgccctggagcagggaaaggctacccactccagtgttctggcctggagattccatggactgtacagtccatggggtcgcaaagagtcagacacgactgagtgactttcactttcactttctattattgagggtgataacattagtaagggagaatccagtcatttaatccatgatttctgaaattggattttttttttcattttttaaatatatgtacacacttagaccattgtagtataaataatttatagaaaactctagcacttcttcattgttttaaaaaatggacagctattctgatacataaaaaaacatgcatcttaatactccatggagtcattatgttgatggtgtgcataaagaagtatcataatattgatcatttattaaaagcagtaaactcagtagcagtgaaagtgtctggtgtttcattattgctactgaatttttcttctaggacaaaattctaaaaacatcagttcctccccgagcattgagagtttgcctggagggagagagttcactggctccccaccttcatctgctgctaagaaggattcctttttcagcaacatctcccgatcgcgctcacacagcaaaactatgggccggaaagaatctgtaagtattttaaggacagttttctttttattcttcattttcctctaaaatgcctcatttgtgaaagcctcttttaatgcctagttttataaagttcttaaaatcattatggactaaaatgaaatatttcatcaaaaatattttgattcttataattcagtaatattttaaggttgttgtctgtattatactggattggggacaaggtgacgtagtatcaatttaaagtcagatgaatcctaaattttcattctgttcttttttgccaaagcctgtgttgtcttctaaaatgtaatggtatcatcataacaaaccacagaataagacactttaaacagaccaagctgttcacgttgcattggtagccactgatgccattcgtatgcagtactcgagcatacagctagtacatagcaactacctaaaaaaaatctggcttctaaaaaattttaagtcaccttcacaagaactaaaatgtttatcacattttatagctaattcaacatgatatcctaatatgaagaattccactgcccactggaagaggatgtaaatgtgaggccttacagaaaggggtctggatgtggctgaaagggtgctgagacggcagagtaaggctgctgagatgcggggctgtaaaacgtctgagggataattattcatggctcgtagacacagtaacagcgtggtgtctctctgtgtgactgtaggacacgcagtgtcctggggcctcggccgcctcatctgcagtttgaagcgctctgaaggggagatgtcaccgcacactcacttggggtgcttctctcatatgcacaagagcagcgtggaactttcatttgacggtggcagctttaatgcaagcagttagctctgctccctcctaaactccactccaagacagttaaagtcattggagataaaccctccgggaataagaaacactagagaaagcaacagcaacaagatcttgttacttggaaagcagatgttaagtggaagctaatgcagcagcctgagaaagctgaacgctaaggcagcagtagggaagaaccaggaagcaacttgagtgagatggtagaccctctagaagctcaggagcagtgggaacttaggagcagggtggacgtggagctgaagacatgttatggttcagccactcagttgtgtctgaccccatgaaccgcagcattccaggcttccctgtccatcaccaactcccggagtttactcaaactcacgtccatcaagtcagtgatgccacccagccgtctcatcctctgtcatccccttgttctcctgtcttcagtcttgcccagcatcagggtcttttccactgagttggctcttctcatcagatggccagagtattggagcttcaactttagcatcagcctttccagtgaatattcagggttgatctcctttaggattgactgcttggttctccttactctccaagggactctcaagagtcttctacaataccacagttgaaaagaatcaattcttctgcatttagctgcctttatggtcctgctctcatacccatacacgaacactggaaaaaccatagctttgactatgcagacctttgtcagcaaagtaatgtctctggtttttaatatgctgtctaggttgatcataacttttcttccaaggagcaagtgtcttttaatttcatggctgcagtccccatctgcagtgattttggagcccaaaaagtaaagtctgtcactgtttcaccatctattttccatgaagtgatgggaccagatgccatgatcttcatttttagaatgttgagttttaagccagctttttcactctcctgattcaccttcatcaagaagctctttagttcctcttcactttctgtcataagggtggtgtcatctgcatatctgaggttattgatatttctcctggcaatctcgattccagcttgtgcttcatccagcctggcatttgtcatgatgtactctgcatataagttaaatgagcagggtgacaatatcagcctttcctgattctgaaccagtctgtttttccatgtctggttctaactcttgctttttgaccggcatacaggtttctcaggagacaggtaaggtggtctggtattcccatctctttaagaattttccagtttgttttgatccacacagtcaaaggctttaattagcatagtcagtgaaggcagaagtagatgtttttctggaattcccttactttttctgtgttccagcagatgttagcaatttgatctctcgatcctctgcctttctaaatctagcttgtacatctggaaattcttggttcctgtactatgaagcctagcttaaagaattttgagcattaccttataaatgaaagaaaaccccatacctgccagagggcacaaacagaaccttgtgtgtgcccggacccaggagaggagccgtgggagcctgaggcaggcccgcctgcgagtgaggggccccagcggaggcgcagccagcggcgaccctgccacaggcacaggggctgcgcagccgccgtcctggagggggttaccattagccccactgcagagcgaccggaactctggggacaaagagatatcccacagacacacacagtcaggcgagaaaaattcccaacaatgggtcgggaattacagtagctgcaggttttgcgtggcagcaccagaagtaaggcagtggaggaattccatcaaagttctgagaggaagtcacttccaacctagactcagtcccccaccaagctaattaactgtgagggtaaaatgcagcgactttcagtcaagaggttcaaacacgtgtattcctgtgcacccattctcagaatcccctggaggacatgccccatgaaaaggaggacagataccaaggacagagagcattcgggagcaggggcagagcatctgacaggcaccagggacagagaccgctcgagaaccagggcagagtgtccaacaggcaccaaggacagagaacgctcgagaaccagggcagagtgtctaacaggcaccagggacagagaccgctcgagagcaggggcagagggtctaacaggcaccaaggacagagaacgctcgagagcaggggcagagggtctaacaggcaccaaggacagagaacgctcgagagcaggggcagagggtctgacaggactcttcagaagggcaatgtaggaaatcctcggagctcgtggagcacactgggcagccgatccgaagagcagccgccagcctggattggagcaagtcagaaagttctggaaagttttctctaaaaagatgaagttggaggaatgactagtacgcttaaacaaatttagaaatttatgcagctaaaggtgagttttaagtttgaattagtggcaactttataaaaatgaaaccattgaaatccaggacaagtgataactccaaagaaaaaccaagagagtacaggaaagacgaacagtattgatgagtcctgtcactcagccaggccaggagcttatatgcaccctgtcatgtaggtgctgacggttaatcccgatcacgtcccatgagaaggtgagtggcagccgttgcctggggaggaaggggcagtggtggtcagagctgcgtcttcatcttccatcttggaaatcagtgagtagtcctctctagaaaaatcaggatgtggcaacataagctagagctataaaagtgaagggaaggaaaaaacagtgagaagaattgaaagtggctgcttgtggagagcaggaagtggagggtggggctgtgagaactggttttcataacaagccttgtagagccacttgagtcttcaaactgttacatatgtagcttagattaaaaatgataaccaaaaattacaacaaaaatagaatgtttcggcataatagattagaagaggagctgtctgcctgcacaaagagcatgtctctgaagagcgggggtgaggactcagaagtgaggaggcatatggagacgtgttggctctgcgttccgtcctgttctggtggcatatgggttaggctgcaacaccaatgaatgacttttcctttatggtgcggctgtaacttaaaaccgagaagttgagcgaaaatagagacggagtaagtctagctctctgcagagatctgctgtgaacccagaaacagagggccccctttattactcaaaatttaatgtctttcttaacttgtggggggtggacacattttcaagagaaagcccgtcgttttccaagtaaaaggttatagttttagggaataatggctgtggtccgagctctctggtccagctatgcccaccgtaggcaccagctaggactgcccggtgtggtccgtccgccctgtggcctgctctgtcctgggagctggggacggcagcggcaggcctgtggttgtgagcccttcttcatcttccctcctggcacagtgagccgagactgtcgctcctcctggcccgagcaaggctggacacgttcaggtccagagctgagactcgatctcccgagggagccaagtgctgccgccagagtggtcccaggggcactggagctgcgatgagacgcctcccatccattgctttcatttccagccccgtttggtgcgatgcagggatattccatgtcctcagaaaagttcagagtaatttttcagtaacatcatcatcaccaccagtttctctcacagcaagtggccagaaattgaagcaaagacatctgttgctttgggtccctggtgccataaactgtatgatgcctttcagatttcaagactcagttgatctcttaaagcgtcccagggttgataaattactgatgtcagctaacaaaaggctgaaatagcagttgataacaggcattaaaacaaagataatctagcggtagctgtcaacctagagtggtgagatctgcttataatgtttgtaatctaatcattgagaatcgatttttcttcatcatcaatataagtacgatgtatttttaacaagaatcatgtattaggtcatagaacttacttcctctcatcactgccgttttatgtcttacagaaagactttttgtaatccgtaggctgccttctttaaatgtgctcctgttaatgcctccgatctggttgcataataaaagaacacaaaactcagctaagtctatagagaggtaacaaattaagctttttgccatttatttataaaagacattattatagtacttttctgaaatgtgcacaaaccagtaagaagtttaagaattgaccttacttctttatcagtagtagtatattctgaaggttggtgtttattcatggaaatgattttccctctgctttgcttcctggaagtctgtaggtcacaattctatccaagtgatataatttttcctcaagactaaaaaatcagagctttttcagtcttgaggaaattggcagttttgatactaaagttttcatgctttattttgtgtggtaatataaatgacatccagtacttagttttctagaaatctattttagttggtcattcatccgactgctaaataaatttttacttgtcttagcaccattagtcatgttctatgattgttgccaagtcgttttccaagaatatctttgctgaggttaaagtatagagaatataagaaagactctaaaatggatttgtgtagctgaataagttctaatatttaagcacattagccaattaaatgatcttttctaaatttcagatgaactgcaagacattttgctgtggtttgtgataattacataccagtctccaaagatctaaactgataaatggttcagagtcctctctaaaccacaggaaatcaaaattatctgagctgaaaggtcctgcataaaaacatgagctatccactgcctgtaggctcaccgcacccctggggacaccaccctgtgtctttgtgacccccacacgcatccatcatcgccctgcagtagtttgaacatatgcttttgtcatacgaatagaatttatttttataatttccattaatctcatctttatcacagcaaaataacaaaaagtgtcagatgaatgaaaacagatttgaaagcaggctcatacttccggaagtataggtaccctgaacatcactgatctaccccggtcttattctagaaattgaaatttaaggcatgcccatatggcagatataagagagcaggctcactgaaggtgcttagagcgaaactggagaggggagaatacgttagaaatcatagttacagtaaataaaaataagattcatcagtgagagaggccttaggtgcatcagtaccgtggaacagtgaagacagcgcggaagacgggctcagaagacagaccaccatgggctttgttggtctagaccagcttcacgtgagagattagacttgaaccgcagccgcccatttcttcttcccctacgtgcagaccccgtgacttccaggcagagaagggtgtgggggcgcgatggacaggcaggcggcggtgtgcgcagagctgctctctcctcctcacctcctctgacagtgtaaggtggttgggactgtgccaagtggcttttggtaaacaggagaggaagtgctgtctcagatgcagaaatctgttgctcattgtctcagatagcaagagtctccagagaggcaggtctggtgttggagggcacggtcctggtgtctgcagctccccgcgctgccccctcggtggatcggctggtcccccgtctgcccccgtcactgttctcaggaaggctgccgccaaacctgccagctaccctggcatccctaagcctcactcacgcatcgtcgtcctgagaagtctgtttgcaagttccccagcaggctccccctcccaccccagtggctggccagaattcaatcccaggcccactcgggttttggtttttttaaagctttgttttgtattggggtatagctgattaccagttttgtgataatttcagatgaacagggaacgggttcagccgtacatatacctgtgcccactcttccccaggctgccctgagcagggctccatgggctgcacaggaagacctgtggctatccaccgggaatggagcggtgcgcacgtgccctccccacgctccctaactgtcccgtccccccagccatagggtcgctaagtctgtgagtccgagtctgttttctgagtaagttcgtttgtatcgtttccttttagattccacgtataagggatgtcatatgacacttctcctcctctgtctggctgactcactccaggcccacctggcactattccatcctttgcaacggctcagtcacactccactgtgtatatgtgctgccgctccttaacccactcctgacccagtcagcacggggagaggattagagaagtccctgacagtgtgtgtggtcgggtgtccagatgcttttgatgaatccattatccctgaagtattaattgccaaaatggtttatcagctccttccctaaagcactgccagttgtcgtttcagtggtgttttcagtttagttcagttcagttcagtcgctcagtcgtgtccgactctttgcgaccccgtgaatcgcagcacgccaggcctccctgtccatcaccaactcctggagttcactcagactcacctccattgagtccgtgatgccatccagccatctcatcctctgtcgtccctttctcctcctgcccccaatccctcccagcatcagagtcttttccaatgagtcaactcttcgcgtgaagtggccaaagtactggagtttcagctttagcatcattccctccaaagaacacccagggctgatctccttcagaatggactggttggatctccttgcagtccaggggactctcaagagtcttctccaacaccacagctcaaaagcatcaattcttcggtactcagccttcttcacagtccaactctcacatccatacatgaccacaggaaaaaccacagccttgactagacggacctttgttggcaaagtaatgtctctgcttttgaatatgctatctaggttggtcataacttttcttccaaagagtaagcatcttttaatttcatggctgcagtcaccatctgcagtgattttggagcccaaaaaataaagtctgacactgtttccactgtttccccatctatttcccatgaagtgatgggaccggatgccatgatcttcgttttctgaatgttgagctctaagccaactttttcactctcctttttcactttcatcaagaggctttttagttcttcttcagtttctgccataaggatggtgtcatctgcatatctgaggttattgatatttctcctggcagtcttgattccagcttgtgtttcttccagtccagcgtttctcatggtgttttaattgtgggattttaggtagcctgagttggactggtaattgtaagatagagattgagcagtggccctcccagtagtcagaattttcctagttacctgatttgctcttcagtcagtgagtataatatatctatcctcccaagaaggtgcattatgtggacagtgctgatcatgatggatttttttatggctttctggatgcaattgaaaactggcatctagagtgtatttaattatcgggtttttttcagttaatatgtcattatgatttctcattatttaatcagtaataccaatgataaatggattaaagtacaatcctatttaaaatatattcccatttaaggtagtttattgaaatgaacttaaacatcagtttttctagcttcttttaagtctcagaatagaatctaaatttaaagccaaaacgaactcatgtattggatccatatttcacttgtcacttggtgctatataaagcgtgctcatgtcgcaagccttccgccagtgtgtccgctcagggtcggggaagatggatcgtgcgtctttggaggagtgtcccctcccctgtcttccatctttttgccttacccagtccatggaagatcactgcaaagaagcgtgggcctcggaggaagtgtcctgaagagccctctgttgttgacagtctagacgctggcagtctaagtttaacttttgttaaacaggttttataaccaacttttcacttcttgcatcaataaatttatttttaatcaaaatctttgaggagcctctgaaaacagaaccacagggagcggaatggtcagtcttgacttaatgccctttttaaggctttaaagagggcgccctttggggacagatgagacactcatctcctcatgctgggccttcttcctccttcatttgtcttcagcctcataatctccgtcaagaccaggatgctgatcactgccccggaggcaaagacgatggtttggggagagctccagtgaaacagagatatttagaatccccggccagaaattcctgtgggtttgaattatcctgttaagtgtgtcattgacaacatttgcttcctcacgatgaccttccttgaaccgtggcgttgattccatcttttaatgccatgtcgccttgggcacaggaacaggaggaacaggaactgccctgcgatccacctgtgcgtaagggccagagctgaactcaggggctcccgggccgcctcgctccaccctgacccccagcccgagtctcctgcccctagcgtccacggtttaccttttccaggaagctgcacttgtcatccactgggctccacctgcagaaggggtggctgtgctcctgtcacaggaattctgggcaaagcgggggtctgtcaagtggcctcccccttgccttgagaccttaagggcaagtcacacctttttggttcttcctcatgagtcagcaaagagctgactcattggaaaagaccctgatgctgggaaagattgggggcaggaggagaaggggacgaccgaggatgagatggttggatggcatcaccggactcgatggacatgagtgtgagtaaactccgggagttggtgatggacagggcggcctggcgtgctgcggtccatggggacgcagagcgtcggacacgcctgagccacgtgagcagcaccaccacgtcagagctgttgtgcccagaggctcggtcagaggccggacgcctcttcctgagccctgccgtctcccctgcgtcttctgttaccaagtgcccacgtgtccagcattcgtgactgggttgggcaccagggagcccgtgcctctcgcaggggtgggaggagcagagacgggtgtcgcccatgctgcccaggtgccgcttccggagccctgctgagggcggggggcggctcacccacccagcggcagcctgagttgggggcggttcatttctctgcccagagggagtatctactccccaagtcctgtacccaaaggaggtgactttcttcctagttaagtttaaagcatgttttaggttagaaacggtgtccctggtagctcagctggtaaagagtctgcctgaagtgcaggagaccccggttcaattcctgggtcaagaagatcccctggaggggggcatggcaacccgctccagtattcctgcctggagactcccctggacagaggagcctggaggctgtagtccacggggttgcacagagtcagacacgactgagcagctcagcacagcgccactcacagcgtgggttagtaaagggcctcaagagaaggttatccgtgttggaaaactcagcatctttccattctgtggcagtgatgataaaaaaaatacagatgggatcgggaagacttgctagcattgacacagtaactaataagatgagggaagaaaaacaaaacctcatttgaccataaaaataagaataaacataatcttacacagagggttcactgctcacgctttattaagcctcttcataagcatgtctgtcattacaaatgcatctgattactttgtcataactttgattagattaataaaatttgctcatatacacttgaccttcatctgaggtgtttgcttatgaagtacaattggtcatgagcaaactttaaatatgtgaaaaagagcaaccaccaagaccattctcagtcaggacattacagtgtggctgaaggatttaaaaagcctcgaccacatggatcaccagaagataatataactgagttcccacacttcctgtttttttaagatgatggcaaacccagccctcttttccctgggaattgtcaccaatttaatacagttctgtctatagccttatcatttctagtcaaatagcattttccaaagttacttaggtcggttggtagaaacttgaagagcagtatctgaaagcatgatgataataagccatgaacaaactagctttccattaaatcctaaatagttatgggctccgttggaaacggagagaaaagaatgaagagacatatttcagttggaagactagttacggaaggggcgctcttccctcacccctactgtttgttcctggactagactgagtcccagcttccttgggcgtatttcccaactgtgttttcaccgttaacgttcctactgctctgctctaacacttgctctaagacttgtcttgctccttcatctagaacacattccttccacacctcattttgtgtcagtttccctttgtgtgaatctgtgccagtttacactggcatcgttacgcctgcaggcggcggttaactcccctgagccgggggagtggccgtctgtaggggatgccctgtgtcccagccgcgctccccctgttcatctgctgaggcccagggccggctggtcgcaggagagtgtctggcctgggctggtggactgggtctgtgcgctgcggggccgtggttcccttcctcctggagtctgccccctggtaggcgaggctggtctagagcttcctgcaggcttcctggggagggaccaatgcctgcccacgatgggtggagccgggccccagccttctggtgggcaaggcccgctgtgtttaggggagacttaggcaggcagcctgtctgctgaagggcagagccatgtccctgccctggtggtcatttggcctgaggtctcccagccctggagcccacaggctgcaggccaaggccagcccttggtgctagccacctgagcgagacgtcagcctccaacaggagtccgtgagagtgaatactccccaacgcatctgcccccggcttgtctgcccccggcttgtctgtccccagcgaagtcacagctgctgccagcccccaccccctcccccagcaaccccccaagacgagcagccaggtctgccccaggcccttatgaggtcgctgctcgggtctgggatctccgtgggcaccctccaagagaggagtctgcttccccagccctacggagctctcgcattaagcctctgctctgcagagccaagggctctgggggcacctcctccagatgctggtcctcaggctggggcccggcctgggactccatgcactcactcccgggggagagctgctgcagtctctcacctcctccccggtctgggtcgcccccccggctgatgcaggctttggttgtatctcgagtgccccctcctgccatcttgtcgtgatttcttctttatgtctttggatgtagaatatcttttttggaaggttccagtctttttattgatgatagctcagcagttagctgtgattttggtgtgctcgtgacaggaggtgagcttgaggttctcttcctaaataaacccattctgacaataccttttccctgcaacagtgcaggctctcagactagcatctaggatggctgacaggtgacccgtctgtcaggcctcccctccgggaggccctcttggaggccatccacagcgaggacagaattgtcaacaaggccgtgaaagcttgcagtgcatgcctgggttccttctcaggtgccctcacttacctcaaggattccactaacaaggcggtggaaagagctggtaaccgatcccatcaacctgccctgcatcccacctccacacagtccagaacctggccgaggtcctagcacgcagtcgtgctgcaatcagtccagaatgagctgtgacatcgcttcccctcaggagacgctgtctagactggacagtctctggggctggagcatgtctgcagactggagcatgcatctgacccctccatcatgaaaagatacatactctgtgaaacattaagagcaatactttggaaaacgaagttgaagaaaaaagaatgaaaccagcaaggaaccactagataataatgctagcatttatagatgtcttaaattcatctctagacagcaaactttagtatcatccagctagactattaatagctctttgccgcccaggatgaatggatgttgagtttctctcagtatctataatcagcgtcacccatccgtaggctctattatgactgaactccttttttgatatccttgatgaaagtctccaaattagggttgaaggttgggtcagtacaagattctttcccccccccccccgataaatgagcaggcctaattctttttgctaggaactgagatttaaatttctgagatggactgatcaatgtgaagactgtttcagggcattccagtgaaggtgtcattatttaggatgctttcagttgaatataatggaaatcctgactcaaactgatccaaatagaaacaggttattagctcagataagtccaaagaacttctcattccttggctatgcttggaattacctggagagcttaaaaagcaccaggatcagaagtacggaatcagaacctcctgtggggcttggatcctggtaatcgttcagagcttccggggttgttcagatatgcaggcgaggtttggggcagatgatgttgaaactcatcgacgccttcccgggcccgggttcccgccaccctttgtgctgccttgctcagaggcccgtcctccatgcagaagcagggagaggagagaggccatgtcttctgccgccccggctcgggttggcctccccttccgggaggcttctggctgcaaggcccccgtgggaaaggccggcagtgaaggggggagcaccagcgcccacccccacccaggagccagagtccattcaggctgccattggtgccctgatctccaaaccagagctgttctgcaggtggttgcttctgtgacagcataaatcaatttgatcgtcatgagtgttttcatcttcaaaggaacaggaatgttcgtgaccgttttgtcagaggcagtttgtgtgttcccccgaaacaccacgccatgcagaatcgttgcaaacccctggacccatggggaaaatgagcttggggagcagcattcagaaacgtcatcagtgacccctgcagcggggacctagttgatctgacacatgttaaaatgattatgaaacaaacagcgcaataaataggacccttcaccttgaacgacacctgcagcttggctgggaagtgaacgcaggagaggtcacagctcgtgagttatgatgaaggaatggaaggagaattctctggaacctgacagattagggttacatgtgctgctcatcacacaggctgtgaacccgggtcactgacagacatgtgaagggtgtgcatgtgtacaccctgtcttcctgggtgtctgggtccagcttcgtgcatgtgtacaccctgtcttcttggggtctgggtccatctttgcacatgtgtacaccctgtcttcctgggtgtctgggtccagcttcgtgcctttgtacaccctgtcttcctgggcgtctgggtccagcttcgcgctgttctctgcgttcaccctgtgtttctcatgggtgcagctctgcctgagcaaacctggtattcacactctgcccatgtgccctcatccaccagtctcgctggaacaaactcacatcttcagtacaaacatcttaacagccctgtctctactctgggtatgctgggtagcttctgaattgggttgggttgaggaaaggaaaatacgaaaaggttacacttgccgtatgaatttttgatctcagagctctgctcggtgacagtgttctgctgatgaggactttgagagtgagcccattctctccagtttactgggcacggctgattcacagggctgtgtttcaggtgtgcagcaaagtgacccagtctcacacacgtgtatccactcttctgtagccaccacccccagtgtctaaccccaggtttctcaccaagtgttgactccgcatctgcatcctgctcagagttatggggggctccttccctggggtccatctgggagcatgccctgcgggaccctcatcagagttctggggggctccttgcctgggatccatctgggagcatgcctgcaggaccctcggcagagttctggggcgctccttccctgagatccgtctggagacgtggcctgcaagaccctcacaccctcgccctgtgcagccttggcacaagctccgctccgagcctcagccttcaagggatgtgcagccatcccaggcgcttcgctccgagcaccgtctcacccaccctgggctgctctgctacaccttctcttctgaccggaacgattcacgcaggcacaggtgtcctggagttcccgccggtctctgcccaagcacctctgtctcacagagcctttccaccgccctccggaagcttcaggcacttccaggaggccgctgtgggcctactgaagctcaagagtccagagtcatcccctaacctcggaagacgggtgtgtccagggttatctgcagatgcttcctttgctttcactgttggagagctgcttgtatttagttaataatgtaagactcagctttaacgttaattgtgtctgtaacggtaacactgtaacagatgctgtgtctggcacttggtaagtgtctaggaatgagtgaaggctgttgagggctctgtgcagcgcagggattcagatgctctagacttcctttgggcctttgctgaagcctgaaaagccacctcactgggacttccctggtggcccagtggttcagactaaaccttccagtgcaggggcacaggttcggttcctgctcggggagctgagatcccacacgccttgtggccaaaataccaaaacataaaacaggaatgatgttgtaaccaataaaaactttagagatggtccacttcaaaaaaagaaaaagtctttaggaaggaaaaaagtcacttcttgcccagtggcattcaccaacctgaaatctggaaactatcaagagctggtggtacacagtgagaaataggagttttacaagttagctttatggacagaatattttaaagtgtgataggtgtgtgaataaaccagtaatttagacaattattccatctctttttttttttattccagaagtctcagaattggtaatgtttgtgttcatcaaagccattccaacacttgctttccttttaccagttgtgacttcaaatatttaagcatgcttgatcctcagctggtatttccgtgggacacgctttttgtttgtccctaatggaacatacggggtcagtgagcccagagaacggtgcacgttgcatcctcacacaggtcagttagcttcgctgtagagaagcaggcttggccgtggccctctggtctgggtcagtcattgtgcggacgcctccttccgcacagcaggggaggcgcgcagatggtgataccggccagcagctctgagaagccccgctggaggtccggtgctgcctgcgtgcttgcgtcagttggtctgatcacgtttaagagaagaggggaaagccctcaataaatgaactaacatctgtgctgactggctggtggaggagacagccattccggttcacaaaagattggtcaggttcctaagtatgaagacacagcatgaaggtgatggcctcacaggccaaaagacggggacatgtccccaccagtgccctttaattagcctgccaaatacactccctgttaggagagatcttttcccccagtttaaatgttcagaaaacaggcagttgccttaacaactgtgcctaacattttttctaccttttgaatttttaaaggctaggaaattcctaagacccaccatacacatatgattatttatttaaaagagcagtaacaggatttttgaaaatactaaggtttgtaactatgcaagtatggttttattcttgtgttttcatctatgtgaggttgccctagttaaagattttattttaatgtctaatatttttgtttcaggaatgtaagttttttcagtctactttagaatttatgatacatgatccagttttctgtcatcatccttattttttctgtttacactattgttttttgtaatcaacctccagaaaggcagagttagactaaagtagctcacgatgttgaaatggtaataggcaaaaaagcatatttccgaaagctcagtgtattgaataatattacttaatcatattattaataatcatatatttaataattcagtcacattacttatgaatattaaaatatcttcagaaactctgggatgaatttaaacaaatttaaacaccatagattacgaacacagggtaccattgtctttttattacccttgtgtttgaaaagcatcctttactccctgatgctcatacacagcctccgtctatcaagagttaaaggggagaacatgcataacccaacaaaagcatctcacctttggctctgaagtaggtgtttgtgggtacagtagaatgaattgggccctgacagtgtaagggttaattccgaacaggacagtgaggctgctctggacgaactggctgagggagctgggaaagctgtcctgggaggctgtcaccatgcttctcccccccatcccacgcacgctgagaagagtcccttggactttgaccaagtgggcatctaaccacgcagccatctgttaaaacatagagcaaggacggagtgaagtgcttcacggccttcccagaggcgctggaagctgtgttcaggagtacacctaaatccccgccatccggagtatggtcccagcccagctgggtagtcaccccggaagcttgtcagaagtactgaggctcaggccccagtcagacctgctaaagagacttcttcaggtgactttcatgcctattaaatgctgaaaagagtgagtctaagattgacggaacaccaaatcagaaaaatgagattttctgtagattaagccagcttcagatacgccctggtgtgagcatattctcctggtgggtgatggggacgtgccctccaagtgtgtgctctgctttgtggccatttggctcgtattagcgcctgtaatcctcaagagacgctctgaggtcggtgctagaattatcggccatttctcagatgagagaaccgaggcatagagaggctctgtcgaaatcccatctgcaaagaaagttactggtcatgacgggacagtgggtaacttctgccttatcagagccagaaggctaaaatcagatgagaaactacgatcttcttttacttcctcagtaaaaattatgggaggcagtgggataaggggaaacttctttctcttcatttgtgagctctgcctgttctaattatcaaatgtctataatccgtatcccctgtgtcccacccatggcaagcacgtgattggagttaattattttaacctgcccatacctgacttcgaaaggatatatggaacactttcacatatggatcagtgaagtgaatgtagatttactatgcacttggtcaattggaggggattgctgagaggcacgcagcagtttggaagagaagctgtctgtgtggagacctgagcgtctccctcccttccccaggtggccggcccgcggctgtgcctgggcggcggcggcggcggcgggtcgggatggccccgttggcgagctgctgaggcggcgtgaccagagagcccggctggcaggcacctggctcctgcccctcctggctcgtttgacggcaggtgacttttaccttcataaggagcacgtattcccttctttattttggtaaaataggcccaacgtaaagttcacggtttaccacctgcgtcattgttaaggtctcactcagtggcattaaactctttcgtggtatagtgcgtctcctgcatcactcttatcgtgcaagtttagaacgctgtgcccattaaacagtagtaactttctctcaactaccgttcgtctttatgccttaatgatgctggcccctcgaagcacctcatgtaaatgctactctgtgcaaatatggttcagtatttgtgtttttgtgacttatttcactgagcataatattctcaagttttgcccatgttgtagcgtgtgtcagaattttcttcctttttaaggctgaataatattccattgtgtgtacagcatgttttgcttacccatccatgtgtcggtggacacctgggtggtttttatgctttagctattatgaataatgctccagggtacatgagtgtacagattttttttttttttttgaaactctgctttcaactatttggggtaggtatatactcagaagtgggatcattctggatcactctgtaattccatttttactttttgagtaacgttcatactgatgatagaaacaaggcccaatgctgtaaggagcaatattgcatgggaacctggaaagttaggtccatgaatcaaggcagattggaagtggtcaaacaggagatgacaagagggagcatcaatattttaggaatcagtgaactaaaatggactggaatgggtgaatttaactcagatgaccattatatctactactgcgggcaggaatccctcagaagaaatggagtagccatcatcgtcaacaaaagagtctgaaatgcaatgcttggatgcaatctcaaaaacgacagaatgatctctgtttgtttccaagacaaaccattcaatatcacggtaatccaagtctatgcccctaccagtaacgctgaagaagctgaagttgaacagttctatgaagacctacaagaccttctagaactaacaccccaaaaagatgtccttttcattataggggactggaatgcaaaagtaggaagtcaagaaacacctggagtaacaggcaaatttggccttggagtacagaatgaagcagggcaaagactaatagaattttgccaagagaacccactggtcatagcaaacaccctcttccaacaacacaagagaagactctacacatggacatcaccagatggtcaacaccgaaatcagattgattatattctttgcagccaaagatggagaagttctatacagtcggcacaaacaagcctgggagctgactgtggctcagatcatgaactccttattgccaagttcagacttaaattgaagaaagtggggaaaactgctagaccattcaggtatgacctaaatcaaatcctttatgattatacagtgaaagtgagaaatagatttaagggactagatctgatagagtgcctgatgaactatggcagaggttccttacactgtacaggagacagggatcaagaccatccccaacaaaagaaatgcaaaaaggcaaaatggttgtccaaggaggtcttataaataggtgagaaaagaacataagctaaaggcaaagaagaaagcaaagaatgcagagttccaaaaaatagcaaggagagataagaagtctttctcagtggtcagtgcaaagaaatagaggaaaacaataaaatgggaaagactagagatctcttcaagaaaattagagataccgagggaacatttcatacaaagatgggctcaataaaggtcagaaatggtacagacctaacagaagcagaagataattaagaagaggtggcaagaatacacagaaggacagtacagaaaaaatcttcacaaccgagatatcacgatggtgtgatcattcacctagagccagacatcctggaatgtgaagtcaagtgggccttaggaagcatcactacaaacaaagctagtggaggtgatggaattccagttgagctatttcagatcctaaaagacgatgctgtgaaagtgctgccctcaatatgccagcaaatttggaaaactcagcagtggccacaggactggaaaaggtcagttttcattccaatcccaaagaaaggcaatgccaaagaatgctcaaactaccgcacagttgcactcatctcacacgatggcaaagtaatgatcaaaattctccaagccaggcttcagcagtacgtgaaccgtgaacttccagaagttcaagctggattttaaaaagccagaggaaccagagatcaaattgacactatctgttggatcattgaaaaagcaagagaattccagaaaacatctatttcagctttattgactacgccaaagcctttgactttgtggatcacaacaaactttggaaaattcttaaagaaatgggaataccagaccaccttacctgcctcctaaggaatctgtatgcaggtcaagtagcaaccgttagaactggacatagaacaacagactggttccaaattgggaaaggagtctgtaaggctgtatattgccactctgcttatttaacttatatgcagagtatatcatgcaaaacaccaggctggatgactcacaagctggaaccaagattgccgtgagaaatatcaataacgtcagatatgcagatgacaccacccttatggcagaaagtgaagaagaactaaagagcctcttgatgaaagtgaaagaggagagtgaaaaagttggcataaagctcaacattcagaaaacgaagatcatggcatccggtcccatcacttcatggcaaatagatggagaaacagtggaaacaaaggctgactttattttggggggctccaaatcactgcagatggtgattgcagctatgaaattaaaagacactccttggaaggaaagttatgaccaacctagacagcgtattcaaaagcagagacattactttgccaacaaaggtccgtctagtcaaagctatggtttttccagtagtcatgtatgggtatgagagttggactataaagaaagttgagagctgagagaattgatgcttttgaactgtggtgttggagaagactctcgagagtcccttggactgcaagcagatccaaccagtccatcctaaaggagatcagtcctgggtgttcattggaaggactgatgctgaagctgaaactccagtactttggccacctgatccgaagagctgactcatttgaaaagaccctgatgctgggagggattgggggcaggaggagaagtgggtgacagaggatgagatggctggatggcatcactgactcaatagacatgagtttgggtaaactctgggagttggtgatggacagggaggcctggcgtgctgcgattcatggggtcgcgaagagctgggcatgactgagcaactgaactgaactgagcatagtcttttccttatattcctactaacagtgtaccagggttccaatttttctatccgcagcaacagttgttattatctgatttttgggtagtagccatcctgatagctttgagatggtatctcattgtttcagcttgcatttccctagtgtttagtgatgttgaatatcttttcatgtacttgttagccatttctatatcttcctaggagaaatgtccaagtctttcctacattttttaatcaagttgagtttttgtttcttttccttgctgttgagttctaagagttctctttgtgtgttcttacgccccttatcagacacatggtcagcaagcgtcctctcccactctgcgggctgccttttcaccctggggtccacaggtgctgtgcgtctcagtgctgggacacagcaccgcttcagtggcagagaaacaaaagtatctgcttgtgtaccttctgctcctagctagccacctggccataccaacctttattgataaaacaaagggttgaaatgagttatctctaaaggaaattccagcactgaaatgatacagtttactaagtaccttaagttctgagtttcagtcctaaatgtctaaatgaaatttctttttcattcacatttaccatgtttgtttacatcctgtttgaaaacaggagccattttgtttactgggaatttgataaccgtctttattgttttaagcatctttaagagtcccattttttccagacagccatgatgctcccactttacatgcagagagagacaccactaccctgaaactgccgctccgaggttgtacctcagacatcagaccaaacactgtaaccgttaaccttttcacaggttattcatttaactcattctcaccacttagtattgtttggagaacagatttgtttaaactgtagtgttgcttagagtttgacttgaaatacattttggtaatttaaaaatatttatatatcttgtttctacttgtttcttatttctttattaattatttaaataatattttgatttattacaaaaacataatctgatttcattgtacaaaatccagaaaaaaatgacctgtctgccgccgtttggagaaaacccgtcagtatctgtgttattgttaaggctgtcccatgtgaccgtgcagtgggttgcatgacgctgtgtacaccagtgtgccaccagtcgcccgagtcccctctcactgggtggccagcatgggaatatgcacgtgcgtgttgccttcagcagggtgagggattccctgggcactgttcacacaggtgtctataattccttggaataactgtataggactatgttaataatctagagatagcgaaaggaacatctattgagcgtttaccgtgtgcaaagcacttcacctggaatatctcgtataattcagtccccaagcatgcgctgagttaggggttattattattcctaatcgtccccgggaaaccaagctcagcgagctgggctgtggggcagggcccagggactgtccgtgcccgtgagatgcacacggtgcggggctgctgagcagccacagtgctcccggcggttctcccgtgggccctcctctgcagacatagggcgcgctggccaacacgtcatcgcactgtgtgtgtgtgtgttcaccctggtgtaaccacagctctgtgtgtgtgtgtgtttgtgtctgtgtctgtgtctatgtctatgtctgtgtgtctctgtctgtgtgtgtctgtgtatgttgccctggtgtaaccacagctgtgtctgtgtgtgtctgtgtgtttgtgtatgtgtctatgtgtctctctgtgtgtctgtatgtctctgtgtgtctgtgtgtctttgtggtgtctgtgtgtgtgtctgtgtgtgtgtgtctctgtggtgtctgtgtatgtctgtgtgtatgtctgtgtgtgtctctgtgtatctgtgtgttgtgtctctgtgtgtgtgtctgtgtatgtctctgtgtgtctgtgtgtgcctgtttgtgtctgtgtgtgtctgtgtctttgtgtgtctctgtgtgtctgtatgtgtgtctctgtgtgtctgtgtgtgtctgtatctctgtgtgtctgtgtgtgcctgtgtctgtctgtatgtctctgtgtgtatctgtgtctctgtgtgtgtctgtgtgtgtgtgtatgtctctgtgtgtctgtgtatgcctgtttgtgtctgtgtgtgtctgtgtctttgtgtgtctctgtgtgtgtctgtatctctgtatgtgtctgtgtgtgcatgtgtctgtctgtctgtgtctgtgtgtatctgtgtctgtgtctgtgtgtgtgtgtgcctgtgtctgtgtgtgtgtgtatatctgtgtctctttgtgtgtgtctgtgtatgcctgtgtgtgtctctgtgtgtgtctgtgtgtgtgtggccctggtgtgaccacggcttccgcaggacaccgaggcctctgcactctgcttcctcagcctctccattcccttcctgcccgccccttgctgcccgccccttgctgaccgccccttgctgaccgcccgtgggcagcgggctctctcccgtctgctggccgcctgctggctgccgtgtgtagcccacccctgccggtggggttggtctcatccccgtgggctctgcagaccccgccctcgggcccttcctgtccccctttctccaaaccgggagcactaagggctgccgtgggcaggccccgctgctgctggggtccccggcagggcggggtcgggcccagcccccagagcaccatctcagaaggagatgagggggcaggaagactccagcccagcccagatcctactctccactccccgcccagctgcgggctctttgccctggttcccagcttttctgattgtactgctttgttcactgggtccctgcctcctaaaacatctttattcctcatttcctccaagcccagtccctcttgaagactcatcagaaatgctgctgcttgccgaaaatctttcatttccacctctactccttgaaagccggctgtcctgcccgtgatggtgaaggctctcctctcatatctgctgtgaagcttaatgccttgctcctctcatgcttgacgtgtagtcttacctcttcctaagtttgcagaggtcgttactgtatttcccacaagccctaatgcagtatcaatgcatatatttgttgaagaaatgaagtaataaataagtaataaagtacaaaagctcatcctgttattaaccaagaaagaacataaagacattgaagcacttaaccaaagtgatctataaaatccacatgttagaaaacaatttaaacaatttgatgcatataatatgagtgaaagtgtaatgaaatatcaactattcgggggagaatggtggtagaaataccactttttacaaagcaaattcaaaacacatttctccagatacagtcgaaacaaaaatcattcgagaaatgaaacggaacacaaacgatcatacctgaatgaaggaaaatgacttagtaagccatttagggatgggtctggacactgtaaatggtgagcttctcctaaaggaagctgagatacgaaggcactccttggaagggcctggtaatcgagtataaggaggagtatgcccaggtgagaactgggagccgtgggcaggcggcccgggctcgcacagcgccgcctccacgttggcattgcttccgaggaggtggcttgcagaggcgcccgtgtcatgtgggacatagtgagagaacccaccgcgtgggcttgctgtgaggggtaagtgagttcctgcaggcagcgcccagagctgggcctgccacagcccctgtgaaagggcccgaagccggcggtgtgctcctctgcgggcggacccgtgctctcgctccttccccggaggccgccaggcccctctggtgctgcgctgctcgcacggtctgccggcggcccgcctcatcctccacgtttctcgccccacacggcagtggctctgcagaacttgagccagtggtgggctcccaagtcctaactcatccttctgggtggagccacataaagatgtttacaccagagaccagtgtcttctaagagtgaatcaccaacctccgtattaaaaatcggttctacttcctcatcagttaaattactaatttacagtataacatgttttttattaagagaaactaacttacagagaaatttggctgagagtagacaacggttaaggccctttcttgcacagaatgctgtgctttaataaatcatgatgttgtaatagaaaaaaaaaaatcagttctattgttttgacctgattttaaacattaaagaataatgtcctttgtggagtacctgttctgtgccagacactctccatgtgttgccgttcgggtctcatcaatacattgggggaaaaggtgaaatgaagaaactgtttgagattacacagccagtgtcctcaaactggcagaaagaggattcgaacccaggtgtgtctactgcacaccacccacttccaccatcctgcctcccataacggaaggcagaacatgtatgcaaaagcaaatataacgagaacttttcttcatatcttatttatacataaaaatgacactaactggttggttttataaaatttcaaggcaattagccaagcatttatttttgattacagaggaccattaatgaaagcaaatgactaaagctgtctgtgtctgaggtgtgtggagcctcagaagctaagatagaaatggaaagtctctttccacaattttagaatcttgattcttggctctttcttttatctgtaattatataaaagagtgaagaataaatgacaaaccagccttgcgccaagtgattccatttctatttataaagtctgagtgatcgttcaagggcttgggtgtattttcattaagcaaactccagcaagatcgtgtactggatttaacattccaaatggaagagtttcttgggcccctccacctgtttcaactctttgtctcacagatgggcttttgtgtcagctttccattgagaaagaaagtcttacaggaatgaaaactgctgttttctgccacgtggattccgtttgtactgaggtttactcaggacttaggcaagcaagacgctcttcacttgctgccagtgtctaagccaaagtgcttgcctggaggcctgtgttatgtcccgcgcgctcacgcagcgcgcgccccgggctgccccgcgcgctcagccagcacacgccccggctgccctgcgcgctcagccagcgctcgtgcaggtcgtgcatggcacagtgcagcgggcgccagcctcagtctcagcccactttgctcacagtcacgcgtttggacgagcggacctccctgagctctgtgccccctcccgctgtcagcacctcactacccacaggcgggactgtgtcctccgtctcctctccagctcttcttccctcccagattttattaaaaaaaccacactgaatacacttaatccgtttaggtaggaatgactgctggggtttaaggctcccaagggcttttgcatctcacaaaaagtaatcacttaatccaaactagactcatgcataaagtaaacggagaagagattttaaccagctggtggtacatgcctggtgtcctttgtccattctgggctgtcagcaccccagttggaagccaagggcagggataaactccagccagatgccctctcaagagactgccacgtgctggcctcagtacagttctagactcttctgggtgggtttgtatctgtaacacattgaagaggcaacttgttcaatagtagggacaggaggccaggaccaggattctcagagcatctattcttatttctctgtaagattttcatgtattctacctcatagtctggtaattagaaacctttcctattccaactccaagcttgtaaacctcttgggagcaaagtatctaacttctaccttctccagagagtgctgacgtcaggcccttactgggtagaggattcggagaagacgatggcaccccactccagtactcttgcctggaaaatcccatggatggaggagcctggtgaactgcagtccatggggtcgcgaagagtcagacacgactgagcgacttcactttcactcttcactttcatgcattggagaagaaaatgggaacccactccagtgttcttgcctggacaatcccagggacaggggagcctggtgggctgccatgtgtggggtcgcacagagtgggacacgactaaagcgacttagcagcagcagcagggtggaggattatttaaggttgtgtgacttgtgaatggcagggctggaaacagaactcaggcttccttatggctgtgcccctctagcgccccttcatcccactgccgtgtcagttatccattgctgtgcagcaaaccaccgtaaaccccactcctcaaagcagcgttgctactgctcacgggttttcaggccaggcatgcagacggctgggttgggctgctcttctgcgccgcctgctgggttactcacttggctagcttcagatgggctgggctgaaaggtccaggaagacatcactcacgtgtctagaaccttcttgtgtctcctgtggccactttctctccatatggtgtctcctcttgttcattgtcatagcctgaacttcttcacaactactatggtagctgccttcctctagtgaaagcagaaggaagcagaagttggcaggcttctgatacagtgtgccttctgctgcattctctggatcaaggcaagtgacgggacagccgggatttgtggggaagggaagtagaccccacctcttgatgagcagaacagcgtgtacctcaaggaaggaatggatggtggccatcttcagagacaatcacgaccaaggttaaccaacagatgtagcgttctttcttggtttcctgtggggtcctgagcaaacagggaagctcaagtttgtgcagacccaaaggagaaaaaggaaaagaaaagcgccctgcaacagctacccgaggccacagtcctcattccctggctgagctcctggttgctttgtctttacttgagtatcagaagagaggccgttgtgcttggtgggatgtacagggtacattgggatgtactttacaggatggtgaagtacagggttcaagcttgggccatcctacagtgggcattcacaataatttgtttttagagcgactgctgtgtctgttttctgcatcaggcatttgaatgcatgttcctaagggttcaccttccaggcagccagtaaaaacagtgtttttaggtgctgtgtatgtgtgtagctaacacgtggtatacctacaagtcatcctttcagccattaatttccatctgtgtgtcaggttgtattcagtctcttaagaagaagcatgtcttgggaggtttctctccactttgtttcgacaacagaggattctcatttggagagataagtgcctgaccctggaaaaccaatctgccagccttgtccagctctggcaacgtcctttctttgtattccaactaacttggtttaaatgtcttacattatgagaattattctcttctctgagaaaaactcccttaatcttctaaatttccttgggaaatttttcacatgcattactttttttcttaaaaaaagcaaaagctccaggctttatctgtttgttacagttagattatctttccgccatttagataattatcccacccagagtatttttccctagaaacaatcaaataaataaaatcctctagtactctaccaagagaggggatgtaagagcggctgtgggggcaaaactttcccaagtgctttgggaaatctcgtgttttaagagattatcgtggtctagaaaatgaagagatttgttttaaacggaaatttctggtttctcaaacgtgtatgagaaaatgtaatggttttgtaccaactgtctagggagttgggtccaccaaagtcccattgactctcaatttgtgtggctcaaaagttattgaaggtattttatgtacttttttaatataagtgtgtatgggtaaacatttacacatggcacggagcaagcattcaattaaaagtccagagttgttgtgaatctcattttactcctcctctgtctcattggcggtggcggcgctgggtttgatgttcatttgcctcctttgtctcactggcggtggaggtggtgggtttgctcttgttcatttgttgcttcctttgttttgtctaggactaaaatgacatggatggcggctctttaaaacagtccagaccttttggaggactttggggattttctttgatttttgttttcattttcggatctttgcccccttcattttaggaagaagaattagaagcccaaatttccttccttcagggacagctgaatgacctggaggccatgtgcaaatactgtgcgaaggcgatggacacgcatcttggtgagtgcgggctccggccctgggaatggcagcagcaccggccacggatgcctagtgcttcccgtgagttacctcatgtcaccctcgcagacaaggaaaccagagcgcagagattaatcaaatttcccaaattataacactggtcagtggagcagaaattcagaatcaagcagtctaactccagatttcagctcttaatggctacactgccctttctaagtatctctctaacctcaaacagacaatcacggagctttcgaggtcaagcagtcagctctgctgctgtgctgatctgcctgtaatcactcatgtggtggtttgggcagtgctttctttattttttaatatatctctttttaatcacctgtctgaaatgcatgtcgggacctcttcttccttctgactgtgccggtattctaagaagtgtcctcgtgtgcccttcaggttacacgtgagcggcctgtgtcacgccatggagtcctgggccttacttgctacattcgtgaaagttctgtgttttgtgttagaaaaagtctctactgttagaaaaggtctctacctccgatttgcttcaggaactccctgctgcttacaaaacgtttagactccacactgtgaccgttctcagcccactctcgggcatcctttccctccgtcctccggggtctagcatcgtagttcgggaggaagttagggagatcagacacatgctctcctggacgtgccagtctgctgttctgtgagtgtggggcctcgtgaggagccggaacacactgcccctgtgagggcgcaccagagaaccaccaagtgcccttctctctagcggggtccccagcggggcccgtctcggggccttcactggagacagactgtacatcacactccgtccgctgcccagcctgccaggcaatgagtccattacatgcggccaaaatggcttcgttcggacgcagcccacacgcactggcctcgagccagtaacgagtgatctcttacaagcttggaaacgcacgtggcccgcatggccgactgcctccccacgtctccccgggagcgtcccggccctgctctgccctcggcttccctccatcctccagggagagggcgccggaggaggagatagcgggagaaaccctaaaggcgggtcccttcacatccagtccccaccactccaaaactgttcgtacacttcttcacagacaactttttaaattcagatagaattaattttacacaaatcttacagcatcgcagttcaaggtgcatcagagagaaataatgaagaggtagtttataaataactgatgtatagtccataattctttatgtacagagcaggagctggcatttttcatgactttttctttttaatatatgtagctgttgagttcagttcagtcactcagtcgtgtccgactctctgcaaccccatgaatcgcagcatgccaggcctccctgtccatcaccagctcccggagttcacccagactcacatccatcgagtccgtgatgccatccagccatctcatccttggtcgtccccttctcctcctgcccccaatccctcccagcatcagagtcttttccagtgagtcaactcttcgcatgaggtggccaaagtactggagcttcagctttagcatcattccctccaaagaaatcccagggctgatctccttcagaatggactggttggatctccttgcagtccaagggactctcaagagtcttctccaacaccacagttcaaacatcaattcttcagcgctcagccttcttcacagtccaactctcacatccatacatgaacagctacataattaaaaaaaaagagtcggacatgactgagtgactgaactgaactgatattgcatagttaattttattatttaaatacaagtttaattttaaagtaaccatgagtatatgtgtgtgtgcacacactgtaatttttgcttctctggctatgtggtgacctttgtgttactcaatttttgggttttgaccaaagtagaagaacaaagaagtgactgtaaatatttactgtaggagctctagaaaaatccagtagtgggatgtttccaggttgtttggtccacatagcagcttttaaagcagctttatttaagcctcaggatttccaaacagcttttactcttttagtcagcactaaaagaacatttttctcgttgcatgggatagagaagcactttttaattaaagaaaagcccttatcagctgtgaattttcagctaaccacaaaagcagatttgttttgtgtatatgtttcactttcagccagaatcccttcacacggctgttgacttctctttgctgtaaaagtagcctgactgcatgttctggggccctgactgccctggggcctatggattcattccatttcatccgcgtatgtaatgctttaccacagggtgttcctggattgtaggcagtttggattttaagcagaaatttgcggaaagcataaaggttgaggtgtgaagctctcaatttagttttttacttattatatcctttaaaaatgactttaatacgctcatatttttctccatataaacttttctatttttcctggttagtaaagtagtacagcagttgaaactgaaaaatccactagtaagtgattgattatagtatagtaatgcagtctttataaaggttaaaatacataagcataaagagatgttcataatgtattatgaagtgaaaatagcaggtggcacagtagaacatatttgatgtagaaataaccattgactgtggtggcctgagtgaggaagagcacagagggactttccaaggggctagccttcgtctctgcttggaaaacctgcgggtgcctcaagtgcatgtaactggcaccgtgggggtggtctgcatgctgcaggcacgagtcccctctgagacacctgccgggattcccctgaaggtccgctggtgacgactcagcactgccactgccgggggcgtgggttcagtccctgggcagggaactgagatcctgcatgctatgggcagagcaaaaaaaaaagcagctgcagtgatacctaagcaggagagacaggctcacaagcatcatacaaacacggggtcgaaaccagactccgtcacttctgagatcagcctgcttgtgactgtacataaaatgggtttgccaagatctatcccacccgttcattgccaagactaagacattcttaaagcctcgcacaaggccttccctggtagccagcggttaagaatctgccttcagtgcaggggatgcaggttcaatcttaggtcagggactaagatcccacatgccacggggcagctaagcctgcacactagggaacccgcgtgtcagcacggatgatcctgcctgtcgcaactaggacccggtgaagccacgcctaaaaaataaatcaagccagcactggttgagtgtgcaacacaaatcctctccttcctcttggctattttttttttttaatctaaagtctttgttgaatttgttacactgttgcttccattttatgttttggttttttggccccaaggcctgaccaaggatcagacttacaccccctgccctggaaggtaaagcctgagccgttggaccagcagggaagtccccttcccctcaactcctagctgtcccttctatgtggccgatcccgcgaccagaggagctgagcagtgactggttggggtcccacggctggacagcgagagctgggagcagccctgttgaatgtccctcagtcagaccacgtgcagagatgctggggttggatctgcagggcctcacgttagatgtgtgagctctctgagcaagaacagctcacccagaactgcatggcgcctttgctcccctcagcaaaagccctgctgagcctggccgcccgctcccaaggggtccgaggtggcctcagattctcatcccacccctgcccttttctgacgttaagtattttcattgagttcctctcaaggaaattccgtatcagtctatgttatcatcagacctgcagtgatatcttaaaatgtcaagtacagttcaagactatctttttaacaaaacagatacagagaaaagcatctcagttaaaattttcagaaaggcatttgtttaaatggccctttaattacagaggtaataaaactgactcattaccagttttatttccttatggttctaggacccaaaactgaaagcattatttgttttatcaaaaatctaccaaaattctcattttattgcctccacataattgagctttgtcaattcaaagatttagagacaggaattgaaaaagtgtatttattaaatctaaacttttccatcaacttgacaagactttcttcaggtgttcatttgtctgttgctatagtcacacccctccctgtcatcctgacaattgacagcgtgcacctcggtggctgagttgggctgtttttaggcttgccgtcgctcacacatgattgcacgtgggtgagctgcctgcacttctctgatctgtgagcagctgggcctgcccccaggggaggggtctccagcctcgggttggtattaaacagtggagggtgaaatgcaatgaattaaggggagttagagctatgcagcccagcggatctcagaccgttgtcgagatgaacaccctccaggccctcacggctgttgctcgtttcacagacgaggaaaccgaaatgtgaggcctgggccggacgagggacacagagctcgctggcgcaggcgcccagggcctgtcccaggtctcggccgctcttcctgcgctcctgcggaggcccagctccagtcaggagccagacttcgggtctgcggtcttagcgcacacctccgcgccgattttgcacctgtcgtaataattatgcaagaattagcggtacgaggaggtcatttttgaaaattagtttatttgcctctgcaagagctttatgaatctgatttgctgatatttagcaaaatagcattcagtagatgtttttgaaagtgttcaacaggcaattaactagtgacatctgagagagaaggaaactgaccatcaggcagctctccctctgccaaccacacggtgctgaaagctctctgtaattattaagaatatgaaactttgcatttaagtgcaggatgagatctacttctcctgagggtctgtcagcagatcctgacttgaaagtctgaaggtctgcacttccagcagcccccagggcacgtggtgacactgacccgtgacagacaccaagcagcaggcagcgagagaacttaaggtcactggggcaaaatgcagttcacgtgttcctaacactgttagtgggtccctaccccgccctgcaggcacacgtgcgggaaccctgtgggaggagtgcccccccacccccgccacgatctgaggcagcctgcgcacaccgaacaccagcgctgtgctcagcctcttcctgccctgctctctcctcgtggaaggcgtttctccccagatttgattatctgaagctttggaagcgtatttcttgcaacaaccttatgtatgctaggtcacttcagtcttggcgaccctctgcgaccctagggactacagcctgccagactcctctgtccatgggatcctccaggcaagaatactggagtgggttgccatgctctcctccagggcatcttcccgacccagggatcgaacctgggtctcctgtggctcctgcattgcaagcggattcttgcaatgagccacccaggaagcctataccaaccctacacttactaagaaaaactcggcaaactacatgctgtcttagcctttcgtgggctccgagaacagccccctgatcacatggtctcagtacggacggttcctctttcatcgttttgttttccatttcatggctctcaccatcttcccacctgcttttccaaactgagtatctttcactgtctttttctcttttttaaatataattcccagatcctttatctttttttaagtagcttatttaattggtggctaattattccacagtactgtggtggtttttgccatactctgacatgaatcagccacgggtgtgcatatgagcccccatcctgagccccccgccgctttatctttctaaactgtgtctgatcgcctaacctgtttccccaccgccacaccaggctgcttttccacttcctctaaccccagcctgtccagctcatgacccagggggcaaaagacttgtctaccgcatcccctacctcagcagaaacagtcctgccaccaaaagccccaaggttcaagggccttgtggctcacgctgaacctaagagcttgtgagtgggggcaggtggggcctgcaatgagcagctgagcaccaccgccgcagccgtgtccagctcccagctgagcagcagcacttaactgtccacaagtcatcggctgggcaaactcttgtggcctgagagtctcaaagaatatgtccatcttaagcagttgtgagggtcttatttgactaagtgatgtaattttaagataaccttagccagacttctatctagttgctcacaagtgagaggggatggtggtgaaaaccccaggctgtttcctattagtgaggtccttgctgtgtttctgcttttatttttagaaatacatgttcttccaaaggcatctaaccattactggagctgagagaccttctaagttgaaaaatatatgcagcgtctctcctagtggacttgaaggtagcagccgtatcatgaacaggatagattttaccctgagaagccgtgctccatgctgggctcttggcttgcaggcaggtaaatcctaagagaagaatccagaatctgttgagatccgtgcaggtttggaaccctgagctgagcacactcagttcacttagaactactcattgacctgaagactcgtaatgcacgtattgctgtagtcttcgcttgggtttcctaagtgctgcccctcttccagtgctgagtgtacagtcttcagccattctgggagctggatgcgagtaggacccttgactctattttctgggtgatcttggtgacagacaccaagcagcaaggagcaagagaacttaagatcattggggcaaaatgcagttcgtgtgttgctaacgctgttagtgggtccccacccccgccccgcaggcacacgtgcgggaaccctgtgggaggagtgcccccccacccccgccaccatctgaggcggcctgcgcacaccaagcaccggcgctgcgctcagcctcttcctgccctgctctctcctcgtggaaggcgtttctccccagatttgattatctggggagataagataatcaagaaaagactgcagaccgtcactagccacactcccttcgcccgcccctcagtccaggacgcctgtgatcacgttcaagtcccttcattcttcatccggaaaatatctcacccgcgtctattcctcaagagagagaaccagccctcatgccggctggagagcctcatcttggccattcagccagtatttcctcagtacctgcccttggatgtgaaaacgggtttggggagcagttggttgggggtggagtgaaatggaggagtgcctttaaagtcaagctcaaggtgaatggaagaggagagcaaagcttcagagtagggagagagcacagagactgtatacctcgttagcagtaccagaggtgacacgtggctccagggaagccagcagtgcccccggagcaccagcggtctgaggcattgggggctggcgctctaagtccagggtgcagtgagcaggcctgtctgcaacagaagaccaggatgtgccgtgcagaaccgggcggtttcgggggacttttgtcgtggggcctcgtctctgagcagcagcgacagttgtgaaggataagcaggacagggcccagcgagtggtccttgcagagggaggcccagtgcgtgaacgggttatattgatagactgttatattgatgagatttgtgtggaatttccacagaaatggttaattttacgaatttttttcccccttttatttcagtgtcccaacatctgtaatgggtaatgcttaaatataaggagattataaagaacataatcttacttcttcacagaaacaaaaggaaagagcctttatatcatcatttattctgcctcttactagaaggaaaaacgtctgcattactttgaaaattttaaacatttcacatttctgcctttaatattatgaggtatggaaagatactatgtttttccttttttacacacagatttgacttaaagtcgtgcattagtgactaagaagttgtatattaatgaaacagttgtgaacactgccttgaatcactgtgtggtggaactggctaggcaaaggctttaagcggtcagtagtttgtgagttaaataaaaatgtttgcattcagggcatttagcagcctctgaaggtaatctgtttggacttggatttctaaaccctgaattgcttatgtgcagctagtcagctcagtttattagagctgaggtttagccttaagttgatggagaaggcaatagcaacctgctcccgtagccttgctgagatcgtcccttggacagaggagcctggcgggctacagtccttggggctgcaaagagttggacgtgacggagctactgagcacgcagcctgaacatgaagtgcacgttttatgtctgtgtcggctttcggggagaagatcttcgtttccgtcagcttctaaaaggtgaacgctgaatccaggaagccgggcggcaggccctgctgaggacaccgcgctcgggctcctctcctcggggtgcgccctgcccgcggccccttccgtgagagggcccgggcgatctgcccggggccgggcggtgtggctgctgtacgaggccgagggcgtcccacccagttctcatccacccgcgtccgtgccggtgaccttctgtggaagtggggtctggacagacgtcctcacgctgggaggacggcaggagggagcacctccaggcacccgagggcagcgcgcccgcaccgcggctctgacgcggccctccgccgcgagtgcgcgttcccgcgttccccgcgttttcagccacagcgcttgtccgttagcttctggtccattaacccccaagacaatagacacaccgggaagctatttatgaattcttcttaaagcagagcagcccagaggcaggcagtgcgaacaggtgctgtggccgcggccccgggccgccgtccttgggctcgtgaggggaccctcggggctcctgctgccttccaggggcccgcgggcagcggaggccgcaaaggcacagagtcagcccccggggcgccttccagagcctcctggggcttccctcacggtgcgggccacggctgtcaggaccacccggggccgggggcatggaggcctctgcgaggggctggggggtgcccaccagcgcgcgccggcctgagactccagagacggcggccgtgaggtcggcggcggagaacacgggaagcggaggccctgaggagcaggggggcttcccacggaggccgatggaccagaggcttgggctgctctggctccttacccaccgctgcccagcccccggcctctgctttcccgccagcgccgccactgctccctgaagtcctggggcttctgggagtctgccagcaaggcggggcgtcccgggggcggggcacggtggggcggggcggggcgccccgggggcggggcagggcgtcccgggggcggggcggggcggggcggggcgtcccgggggcggggcggggctccttgtccatggagtcttggtcccgcgtggccagcaggaggtggtgagacctcagctctgagtgggagagtcagtctacacactcactcagatgtgcgaaactcttgctccgaagttccattcccagcagtggcagcccgaggcctaactctgccggttaaaggcagacttgcttcttcactggtcgcccgtctcgtctggaccgaggcccacagctagtttctccgccctgtctcctcgcctcgcccgggtggctcaggactccggggtctcccttgtctccgttgttggaggaagggcctctgagtgccctccggtccctgctggcctctgcggacggctctgtccccgccagagcctctgactgccctgtcggcttggagcctcggccctgaaggccttcggtccttagtgcttcggccgtggatcccagcacgttgaaggcaggaacaggcgctgtggccgagcctttggcttcaggcggtgctcccagcagaccgtccaggaggcagcaggaggtagcaggaggtcacggggcaagcaggatgcgcagggcgcttgctgtccacagtcacctctcttcctggcccccggagctacacgtgggctccacgggcctccctccgctagatcctcaggcacgagacccctgggcttcctgccgaggccctggagcccccacacctaccggccgggctccctgccacccctgggggcagagccctgcgccctcgctgctcagcaggccaaacctctgcctttccaggcagccctccacctcccagctcatccctaaaagcccaggcagagtcatcaacacaaaggcagccttttcagtcctccccgagacctacagaactgcctcggcaatgtctgcatttggtttaatgtcttgttgaatggattttgtgtgtgtgtgtgtttgttttattgagagagaacaaattgttacaggcttttaaggagaccaaaaacattcagtctctaattatatctattatcccatttccattcatcttgctttcttgttttgaagtgggcctaatagccagaaactccagtcacattctgaataaattcaggctgctgtttttctgctgttgtctgtaagaggacttgtcagcatggtctgtagatttattcttggtgaagattctaataaactgtcaggctggacttatgttgatgggacttagtcttcatctcaccccttgctggaaatactttttggaagaaaaactatgaaaaacctagatcacatattaaaaagtagagacattacttggtcagcaaaggtccatctagtcaaagctgtggcttttcaagtagtcatgtatggatgtgagagttggaccataaagaaagctgagagctgaagaattgatgcttttgaactgtggagttggcaaagactcttgagagtccgttgaactgcaaggaaatgcaaccagtccatcccaaaggagatcagtcctgagtgttcattggaaggactgatgctgaagctgaaactctagtactttggccacctgatgcgaagagctgactcattgggaaagaccctgatgctgggaagattgaaggtaggaggagaaggggacgacagatgatgagatggttggatggcatcacccactcaatggacatgagtctgagtatctccgggagttggtgatggacagggaagcctgccatgctgcagtccgtggggtcgcacagagtcggacacgcctgagcaactgcacagcaacaacaaggactgcagtatttcaaaatgcaggttccgagggtgtttttccatggttgttgagtcagtcactactcactgtgcccctgaagtttgccagctatcctgctgagggctaggtgtacccctgagccagaccccgccaggggtgacagccgaccgataagccagcgtctggtatgacagtgctttcgtcagcgccatagaggagctgaagccggggccccgagggtggcctgggcacacagtctgggtgggcaggaaggccgctcccaggaggatgcaggagagctgaggatggagctcccaggcccaggcaggctgagtgctgcccccgctctcctgggcgccagaggctgaggggccaggcccggagcggagcctcggacagcatgaccgagtgcagggccgagagtcaggctcacaggccgagtcactgggctcctggtatggccccaggaagggagggagcagtttagtggagggtgagcctcttcctgcacgggttctcggcttggtgctcggacggtgtcattgtaaagacgtgttttaattgctgcccccaaccaagatggagaaggacatggcaactcactccaatgttcttgcctagagaatcccagggacgggggagcctggtgggctgctgtcaatggggtcgcacagagtcagacacgcctgaagcgaattagcagcaacagcccaaccaagagtctccagaggagcgctgtggggtgcggggcactttcactcgtgcaccccctctttaagaaccccctccccagaagcacaggcccagcagcgctgggggctcaggcacgccgtgtggaaggccacgacctttgctcgctgaagctcttggtgagcagctcagcgtgacgccagtgctcagagctggctcagcgggtcttcaggtcaagtctgcatgaaggccaggcctcacgcagacacagagagacagctccggtgagggggttaagtcttgctgactccacaggcatcgctatctggcgacaaccacagtgccgtgggtttgcccttttctttttaccactatgtcgaactgacaacgtacttcacatttatattttttaaagattgttgttgttcagttgctaagtcgtgtccaactctttgtggccccatggactgcaacacgccaggcctccctgtccatcaccaactccaagagtttactcaaacccatgcccatcgcgtcagtgatgccatccagccatctcatcctctgccatccccttctccccctgccttcaatctttcccagcgtcagagtcttctccagtgagttggctcttcgcatcaggtggccaaagtattggagcttcagcttcagcatcattccttccaatgaatgttcaggcttaatttcctttaggatggactggttggatctccttgcattcccaggggctctcaagagtcttctccaccaccacagttcaaaagcatcaattcttccacactcggccttctttatggcccaactgtcacatccatactactggaagaaccatatatggacccttggtcagcaaagtgatgtctctgctttttaatacactaagtttgtcataacttttcttccaaggggcaagcgtcttttaattgcatggctgcagtcagtgtctgcagtgattttggagcccagaaaataaaatctgccactgtttccactgttttagatagtttctttaacttcccaccaggaggacctggtctttagccagaggggtgaattaacagcactgaaccctggtaagtgtagggagcctcgcggagacgtcgggtgaatgctctgtgctgtccaccctgtctcaggtcagcaagggcagctctgggctctcagcggaagacactcctgtcactgtgagaacacgttcatgggacattggtgggaggctctgtgtcccaggttctgtgccccctctcctgtacccggcccctgccccgtgtctggttgggcagagcatccttgctagaaagagttgctgtgcagtgtggcagaggaattccctgactggtctaaagtgatggtgcggcagcagataaattacactcagggcattagttataaaatgtcattcttttatttttcagtaaatattcaagatgtgatattacaggaaaatttggaaaaggaggatcagattctggtttccctggccggactaaagcaggtatgtccgttcacctgacctggtgtcacccaggccagcctttcgtgcctgtcatggggggagggcaccccgggcccggacgccctgcccgcattgccttccacacggacccctcctgcgtggcccggctcctcccagcagtcacatctgagcagcccgcagccaggctggtcctcagtccccctgcccccaacctctcaccccttcctctccgacgctgctgcggagggtgtgttccgctcaagtccagtcatgcccctgtagacgcgtggacgtcctgggagcacaaggcccaaagaatctcctctaagcagcctgggcccctcgagggtcgtacttggcggacagaagagcagcaacgtccgtgaaggggtgcaggctctcaccgtcagcccacctgacgccctcagccaggcgggcccccccacccccggagccgagggcgctccctgggccgcggtggatgcggggtgtctcccgctccaggaggaccccagagattgccccacacctgtccctgtgcaggcctggccgtgcaggctgggacggctcagtgtcatccataaggcagagctcagtgtttctttgttctttcttccggttgtatattcatacgcacatcagagaagaccgctcaggggacctccctggcggcccagcagttaggactccgtgcctccactgcaggggccacaggttcagtccctggtcagggaactgagaccccacaagcctcaaggcacagcaaaaaaaaccaagactggtcagcggagttggggtcagatgtgcccgaggtttaggtgacgcttggaggcagacccgttggtctttctcatggatcgtcttctttgaaatcagatcaaagacatcctgaagggttccctgcgtttcaatcagagccagctggaggccgaggacaatgagcagatcagcatcgcagacgaccactactgctccggtggcgccgcccagcaggtactaccacgggctcccagggcggggcaggccgccctgggggcgctcaccgcgggaggggcgagagccccggaaccgcacatggggggtaccgcacacagctgtgcggggtgtggactcggggcggcgccatccgctgtggactggcggctcccacccttgggcagcagcttcagcctgggcttctgccgcccgttaggaagcccggaaagctggctctctgcctgtttccggcttggctgcagccctggcctcccttccccttcagcagggggagtgccgacccttcttccccatctcgagtgtacttcacttggccggaaggtttttggccttcaaggggagggacttctcagagtccatcaccctgtaagccacgtgggtcagggaacgttttctgtgaaggcccagggagtgaatattttagcaaaatctcatccaagttaccttctcaaaaagtagcatccggatgcttacaagctgtattttttgtgtgattttaaagaagcagaaaggtattttcaagtggggctccgtcagctttgagcgctctcccagcagagcgccctctgaggcccttctcgcagctccgtgctctttggcagaggccctccgggatgagcggctgccagtgacgggactgcaggcgggtcagcctgtgcccagacgtctgcccggcgcccaggatcgggcgaggcccaggccgggccccgggggcgggggaaggggttagacccagacccctcgcaggagccccgtgcccgcgggaggacccagggcccgcccagcgccccctcaccgcgccccctccggccctgacccctttgcaggccccgccagcagccccgtgtcgcccggagcggccgggcgcggacgacttcgtcctggtctccaaggacggcgaggagcgcggcgccgggccgagccccgcgggccaggcccagccgctgcggccgctccggggcgccgcccggccgctgcttgtgttctccgacccgctgaccggcccggcctccgcctcgtccagcaaccccagctccagccccgacgacgacagcagcggccacagcaaagactcgggcttcaccatcgtgagccccctggacctctgacggccgccggccaccccgctgccgcggagacgcccctgcgcgcgcgccggctgccgccctcggggcagcgcccacctctcctccgcactcccgggcctccagcttcccctggggcgccggccgggccgctgcgcgcagcagggctccagcggtctccagcctcagaccccacggaccggctgtcagcgcccctcctcggacagcccagacagccgtcggaaacggaggccgcgagcgccgcgccggcctcgctgcgcgccccgctggcgccccttgcagcagggcctctaggagcagggcagctcccgggaggccccgctttcccctgttgcttggctcatccctttgaagagaaggtcaaaagagggttgacctttgcagtgtggaagtccggactgaccctcagctgggtcactcccccgccagactctgtgagcgcaggcagcacgcttcgccgcttttgtccgcagcctctgcgtctgggaaaggaaggtcagatg

SEQ ID NO: 146 - DNA, 52187 bp, Hippotragus equinus
  source 1..52187: mol_type = genomic DNA
actgaactgactgaacccaataaagattttaggatcgtgcttggtatatagtcaccactcaatgagtgcctttcaaagattctaaattgcattcttatttttcgcactttaacatgtctggaatggagatgtggcccaaacaaaggcttcttagaatggatacagtatagtattgttattttcgataggttctagtttgagggacaattcctcttcaccgccaactgctcaatccattcctggatccatgagtttccttttcgaactttgtaacctctcccacttctcaggcgagccctttacaggcctctcctggctacgtaattttttagctgcgcggcttcctcagccaatacggtaggcggcggaagcactcgagagcttacggcggcgcggcacccaagcggccgaaggagccggagcgaaacccaactggtccccgcccgcccgcagtcagctgatgggccgaccgtcgcggagaccgccgccgccgctcgaacatggcggccgagattcactccaggccgcagagcagccgcccggtgctgctgagcaagatcgaggggcaccaggacgccgtcacggccgcactgcttatccccaaggaggacggagtgatcacggccagcgaggacaggtagggccggcggctggtgcgcggcggggccgaggcgcgacgagggcggcccggattccaccggcgcccgggtgtgggggccgtgggggtcgccagccttggccctctccgcgtgggggcgtccacggtccccgggtcccgcggcccgtcgccccccaccggcccgtcttggtcgccgggaccccctccctcgcgttcccgcctgtggggtcctccagtctcgacccgccgccgcgcctctctggttccagacgccagtacgtggttcgcacctcccggtccgggacacctgtcccagcccccggccactgcgctccccccagcccgagaccctcatccccgccgcgcccctccggtccgagaccccccacgggatgctcttcgagcccgggacccccgcccccctcaactctcctttgcccagagctggaagcgtcctctccgcggtccgttccaagccgccttctctgggagccaggactggcctccggttcccgcgggaccgggtgccagggaaccctttctttcaacaaacctccatgggcttcagcactcttctgccctacgctggggtttacacctctctttggcgctcaccacgtctccagatcagatacttttccaaagctgttagaaccacctgaatgttatttacaaaacaatgtttgttttccccccccaaaagtgactcacttaagaaaagactctaagaataataaaaatggcttttattttttaaagaaatttgatatttccactgttaatggaaaaccagttatcccttgccataaaaaaattgatgtctaaaacgttcatctctgtgcacctaaagtcagctcttgtcttgttaacagggcgtcttgcccatcatactttgggaaacactgatcagatgcgattttctcattctccccaagaggaaactgaggttcgtggaaagaaaggcacagagatactggtgacgccagaaatgcaccccaagattccccagtccagctctctggtctttccagggttttgtgattggttgggagagagattatttgtgttgtaactttagcgttttgtaagcccttaaaagtttcaaaggttagtggctttactgtgggaatttggaggaaatgactgatgtttttgagagaaactgtgtttccttgctgcagtgagtgttcttaaacggtggtattgcaaaagtggaaagtctttctggaagaaggaaggtccagctgttttgttaaagtgggaagcacagtacagccttttgtcgtctagtttttgaagtctgtagttttgagggcctgttcccattgagaagaggaaacccgaaacccccagcgcctatttgacctttgtgttttgcttttgagtgagtttgttgtgagcaggcaatttacgagtaactgaccgccagcgaggtggagagtgattggttaaacgtggatgtgggtgtgtcaccaggaaggagtgggagactgcggggtgcctgagccacggggagaaattgttcttgttcagttgctaagtctcatgtccttctcaaggagaagaaggaactgtttaaaaaaaagacaaaggacagaataatgatatttgcatgatatgaacatagatggagacatcattttatacaagttagctgtctttgttcagtaaaatattttagtcatgactcatgtgtgttgggtaagttgctgagtatttgcgattactggccaggagcagtgttgatcaatgttttatggaaagtgattacttagctgctctgggactgaagtgttccgggagacactttcatgggggcacagcagggtcctggcagaggactggaccaggtgaggggttggggccttgggtttctaatttgtgtttcaggcccatggaactttctgggaggcacgacactcgttgaagcaggttctgcactttatgagatttatgaaagcacatggctatgagttttttttttgttgttggatatggtggtttgttttcacattgtcataagtgtgtgtcatattcttcaatcgtttgtttattcactcatttatagatttagaaataatctccttattgagtgccaggccctagacagaacaaggagcaaaagtcacagaacttgcccttatataacttctgattcatgattttatggcccctgacctgatagaaccagccaggaaatagaacactgaccaccatttatcatcaaacaagcatttattgggcacttactgtgtgccaggcctgtcttagatttgtgggtagaaaacacgagcactgaaattgatgttcccaaagggctggatggtgtggtgaagagatggccctgtgctctccactccctgggtgctggggagacacaggggaaggagggtccttgggtgagcgctgggtttcaaggaaagcctcctgggagagataacactagtggaaggagtggtctctgtgaccctggtccaggcagagggaaatcgcaggagggagtcgcaggtggtacagaaccatggttatttccagatgcccagagcagaaagtgtactgagagctggaaggcccagtgtccagttatagaaggatcttccttgtgtgccactgttaaaatttggacttcagtttgcgagcagtgggagaccatcaaagagtttaaagcaagcaaatgataccgtcagaatgtgtacttgaaatccttctttatttcaaaatatttatgcatttacttggcacgaaggggtcttagttgcatcatgtgtgtgcttggtcagtctgccatgtccgactctttgtgaccccatgcaccgtagccgcctggcccctttgtccctgggattgtccacgtaagaacattggagtgggctgccatttcctcctccaaggaattttcccgtcctagggatctaacctgcatctcttgcttctcctgcattggcaggcggattctttaccactgcacctcctggaaagcccctgtagcatgtgagttctttttagttgcggcatgtgggatctagctccctgaccggggatccaacccaggcccactgtattgggagtgtggcgtcttagccactggaccaccagggaagtcccccagaatttgaactttaaaaattgccttgtctgactttaaaaatagcaatagttaacgttttaaaagtcccctccctctttcagtagagaattggaccagtgtatgtgagtgcatccagttctcacatctccccatgagatggtttcaatcactttctcttatcgacagttccaaatttcaaggtattgtaaaagtcagaggtgtttttgtttgtttttgcgagttaggcctgaaaactcattggtgctaaaacttgacctccatagatgagagtgtttgtaatctttatcccatgtggcatgaatattcatttgttttactgcagagagatcagtgcattttattgtgggtcctactgggagtcttatggaccctgtagtgtaggtgtcttattgcaatgggcatttggccatttagaaaactggggtgcgaggggcactgaagtaactgttaattcccaaggtcacattgccagtaaatgatgggaatgagatttgaacccaggtctaactctgaggccctagttctttctgctgtgcacctagtcctacacgtttggagaacctgagttgaggcagtgtcagtggtggacgactccagcaacaagtgtaaaatgctaggattctgccttttgttcccccacccccccgggggagggacgtttggcaatatctggagatattttggttgtcataactgggggaggttactcctggaatctagcgggtagaggatgttgaacatcctgtaacacgcaggacagtccctcatgaaaaggattgtccagctccaaatgtcattaatgccgagttggagaaaccctcgtctaggcttaatgtacttgtttgtctgatttgcctagatagtggttctcagagcttgcatgtgcatcagggtcgcgtggagagggatcttgttaaagcacaaagatcctggttcagtaagtggggctgggccccagagtttgcctttctgtcacgttcccagtgatgtccatgctgatgctgctggtcacacttggagggccattgctttacgcagaagagaattattcatcgtgcttgtctgtggagaggcactgggaaagaatactgtttatactttgtcctcttttttttttttttttggtcagtttatgggatgtatttgcctggagccatttatatatacccatctttttcctagtaaatctgaactatatctggcagtgctaagtacagagaattcccccaaggagtaataaacgaatatggaggattcagcttaattccatgggacctggagtcactgctaatggtttggggagcaagtttaggggtctgatcagaaaccttcagggattactgtgccctgaagggttaacagagaatggtgctgctctttaacgtgcattcacttgtattttgttggggcttcccaagtggctcagtgataaaagaatctgcctgccaatgcaggagatgcgggttcaacccctgggtcaggaagatcccctgaggaggaaatggcaacccactccagtatgattgcctgggaaatcccatggacagaggagcttggtgagctacagtccatggggtggaacgagttggacacatctgaatgactacgcacacacacacacacaaattcctttgtttaagcttcgttctttatgaaaccttagtatttttaaattttagttttcagttgcacgttggaactagaatatctgagcatgcagcgtagaaaaacgatacactggtaaagtaaaaaaaagatattcttgagtcagtggagtatgactgtctttctagtcaggaaactgtaaaaataaaagtaataacctcagtgttacgtttcagaatttaactgcagcagtcattttcctggtcggagaaacagaaaatgagactgtactttcaggacagaactgaaatgttgtgaggcaacaggaaatgattccctggacacgtttgctttctgaacttctttgagttgcaccaaaaatttagacagttggttagaaaaggagagatagcatttttttaaaggtaaaatcttactaaaagtcttaccagtaagttaaggctatgggctagctatcttcaattttgaaaactagagtttggagagatgcctgctgatactactgtttcaggggcctaaagatcaaggttgatttctgcaagaaattgttttgtctggcctaagtcaaacaaagagagattgcgtatattttaagatatttaggatgttgcacttaggctggtaagcaatagagatcacagaagactaacttttaaaatatttttggtagcatcttccttttttcctccccccaaaaaaaacatttccccctaataaacattagctgtttatttttttgttttcttttagacatttctaagcatattaagatggtttgaaggaaagctgtatatttagtagctgtttcacagaaacaatgctaaataaacaagcaacttgatttttaagtgttatccttgggaggaaacctggtatagctggaagttttcagtttatacagaaaaccagaatgttaactgctgtatttttgttgtcttacagtgcctaaaaatagactttcatttgtgttacaaaataaagtgaagaagtgagatgtcggaagcctgcgtaggaaagcatctattgctgtgtcgttaggagtggattttcattgttaagatcattttcttttatagtatagtttagaacagattctgaatcttgaatgcctgagtttgaatcctagccatgtgaccttgggtaggttacttttgtctcccagtgttgtagttttgtcatctgtaaaatggagataataaaggctccagcctcctaattgtgggaattagatgaattaacatgtaaagcactttgaacggtacctggcacagagaaggcacttcatgtgtgttggctattattattttcattcccatttattttgcacttaattgctgtaatctcatcagaagctaagcatgtctttgcttactgtgacttttgagtgcgcatgtgcatgcgtgctcagttgtgtctgactctctgcggccctgtgaactgtagcccgccgtgctcctctgtccatggggttctctgggcaagaatcctccagtgggttgccgtttcctcctccaggggatcttcctgacccaaggaccaaagccgcatctctggcgtctcctgcattgcaggtgtattctttaccactgagccacataggaagcccctggtatatgtgtgtgtgtgtaaataaagtgaaatttttcttgcctgaatagaatagtttcagagcaatagatgctttcctgcccaggcttccgacttctcacttcttcactttattttgtaacacaaatgaaagagtctatttttaggcactgcgagacaacaaaaatacagcagttaacattctggttttgtgtataaactgagaacttccactttgggggtcccttacagaccttataactgtctttgagtcatgccttttcagcatttccatatttggtcgcttacaagtcatttcagtcacatgttttcacttataaaagtccttgccctgcttgctgtataagggagccccctaaccactgccaggttccttgattcacgaggaggactgccatcgtgtggtcatcctcacggccacgatgtatttcagtggcaggacaggaaacaaaagtgatgaagggaaaggtatgggctgaagtccagaggaaaccaggcgtgagcttccaggagtcctggccctgtagagactctcaggagatgttccattcccccagccgggagttatcccacacgtgtgaaatactcacactggctacctccaagctggttagaggctcaagctacccaggctgtcactgggggatgttcctgaaggcagcctctgcctcacacgtgccggaatcccagactcccagaaggaaagcaggaggtcagtggtctctcaaatagtagttgtttttttttttttttaatttttttcccatatttatctggctgtgccggccttagttgcggcatgcaaactcttggttgtgggatgtggcatctagttccctgaccagggatcaaacccaggccctctgcatcgggagctcagaatcttaactcctggacccccagggaagtcgctcaaaccttagttagagaaaatcctcagtaaataaatctggaagaagcatggaccagaattgcaaaacagcctcactatctccaactgtttttcttttaagttcgtttgcccttgtatttcaagatttcaaggctgtgaggagtttggaacatttttttttttttttttaatttggaagttaatgttgcatggaccctacctggactgactccattctctcctcctgctcctcagaggttgtaatagcttttaccctcacactggctcacagggtaaaatagcttttaccctcctgggtggcacagaggtcacaaaagataattttgaggctgacagtggaagcatagcaacaggcatggttcctcaagtcagaaagaaaacgtcttctcaggtggaagacccagccacccggcttgtggagccattattctaatttaggggctggtgaaggtgcacatgtcctttgcccctgggtaaaagtctgccggtgacagaatcagcaatctgagggtccccatcatcatggacaggattccttccctagactgtagaaggggatggaaatttaaattttctaagccaatctgattttcctttattcaaaaaaggctagtttccctgcctttcagtttagttaattcagtaaaaatctagtgttttccccctttgttattcaaagaggaaggctgctttctgccgtagtaatgaatagggcagagttcaagagacgtggccggaaggaaactgctgtttatttgataaaagcagacagtaccattagggcttccctggtggctgattgttaaggaacccagctgacaatactggagagttgcatccctgggtagggaagatcccttggaggaggaaatggcaacccgttccagtattcttgcctgggaaatcctgtggacagaggagcctagtgggctacaatctatagggtcacaaaagagtgagacacaactgaagccactgaaacaacattgtaccatatcctttcctcctttcccttttaggccaacatcttagtgttgtatcagtagaaattgctcgggctatcagaattatgcatttttatccgtagccctggagatactgtcagactaggaaaacacatcctttgacgtaggtaacacaaatgtttggtcatttaccaaggtataaaatagcatcagcaatcctaggagcgactggaaaatcagattgatttccccaaacttactattttttcccaagtttaaaagaaatcaggcttggggcttaatttgtaacacatgctatattctgtatttttttacgccaattcaatgaataagccctgtatatcagtttacaatttaaagatgattaaattgttttaatttagctatttggggatgattaaggtgttttttggagagctttttgaaagagctggttttagaaatgctgatgtatcaggcaaggtagaatctgaccttgggattttatagaaacacctgtgtgctatttgaatctcatggccatgattttcaaagcaatcagaaaataatatgtactgaacccaaatgtatgttcttattgggcgatagatttgaaaatggtattaatcgtgacttgcacaaggtgcctctgggtttgagagccagtgcttttcaggaggaaaattatgctttaatctgtcttttctctgtgttgtagcatacgtaaatgagattttataaacttggtgatttccaaaagtatgtttttaacttgcttttgatcagttctttgacagagcgaaatcaaggggctagaaaagatcaaaggaacctttgttcctcatcaggagtatctgtgagcaggtgagatttatctgtatcagataaatctgtgagcaggtcacagatttatctccctggaataggtgcttctttcttaaacctgttggttttagtctgctttttatgtatttactctagtaaaggaacatacagaattattattcttgataggatgaaaaatactgagtaatatttaagagtaatatgttcatttgtgcttttgcataacttcaatttcttggaaataaaattagcatctgagcaaagtgaggatcctagagctcagttaaaagtaaaagtggacttaatgtgtttactgctgctgctaagtcacttcagttgtgtctgactttgtgcagccccctagacggcagcccaccaggctctgccgtccctgggattctccaggcaagaacacgagtgaattgccatttccatactctgaaattcttggcacttggtcaatgccaaatgctgtttttatttccatttttaaggtcagagtcctaattattcataaagatgtactacttggaacaggcggcattgtatcagttagctattgctgtgttgccggccatcgtgaaattcagaggcttaaaacaagaactgtcatcattgctcgtgagcctgtgattcccctggacagtccacctgctcacagccagacttgcttatacacgtgttggccctgctcatttcagccagtctctttcacggggcttgctggccacagactggtagaggatggtgtcacctgacacttggagctctcttccttgtggtccatcctctagcgggctaacccctcttcttcatgtagcctttactcaggcccagtacagagtcggcactgcattgctgcagccacgttctttgggccgaagcaagtcacagggcagtccatctccaaggttggagaaatagtttccacctcttgttgggaagaattgcaaagtcacattgtaaagcgtacacaagcagggagggataagaattgggctccttcttgtagtttaccaccccaagcatgtaaatatcatattggatactatagttgatcttaaggtactgagaaattttgttagaatcactgttcctgtttagcgcagaagttgggtgtttttttgtttttttttttaaccaagtgagagttttgaggttggacctagacttttccacattctgcatttatttggagaaaaaaggagtttaatgcttcctgttttcttgctgttgaggagtcactgctttggaggataaaatgtagaggtttctgaatgccctttagaaaattgttctgcgtattaattgccatatgaagagtctttactttggtattgtcctgaaatgtgaattttcatcaccttctggcagaataagtagacaggagtcagaaaatctgatccagtgctgctgtggcttgtttgatttgtagggctttctccctcctggcttctgcttccctaagtataaaacagatgtcttggctggcatctttgtcaggaggatgtggccaacatgtactcaacagaccacaacttttctagactcccaatgcagtagcaggcagaaggtgttgtctgtgccactggagttcttcactgtgaactttaagagttgagcacgtttctgcagttgttcttattgttgttcagttgtccagtgggtccgactctgtgtgacccatggactgcagcatgccaggcttccctgtccttcagcatatcccagacttggctcaaactcatgtccattgagtcagtgatgccatccaaccatctcatcctctctggtccccttctcctcctttcaatctttgccagcatcagaatcttttccagtgagttagctcttcgcatcaggtgaccaaagaattggagcttcagcttcagcatcagtccttccaatgaatattcagggctaatctcctttaggatgggctggttggatctccttgcagtccacgggactctcaagagtcttctccaacaccacagttcgaaagcatcaattcttcagcgctcagctttctttatagtccaactctcacatccatatgtgactactggaaaaaccatagctttgactagatggacctttgttggcaaagtcatgtctctgctttttaatatactgtctaggtttgtcatagctttttttccaaggagcaagcatcttttaatttcatggctgcagtcaccatctgccgtgattttggagcccaagaaaataaagtctgtcactgtttccactgtgtccccatctatttgccacgaagtgatcggattggatgccatgatcttttagttttttgaatgttgaattttaagccagctttttcactcttctcttttgctttcatcaagaggctcttgagttcttcactttctgccataagagtggtgtcatctgcatatctgaagatattaatatttttcctggcaatcttgattccagcttgtgcttcatccagcccggcatttcacatgatgtactctgcatataagttaaacaaacagggtgacaatatacagccttgacatactcctttcccagtttagaaccagtccattgttccatgtccggttctaactgtggcttcttgacctgcatacagatttctcaggaggcggttaaggtggtctggtatttccacctctttgagagttttccacagtttgttgtgatccacacagtcaaaagctttagcattgtcagtgaagcagaagtagatgtttttctggaattctctgcttttgctatgatccagcagaagttggaaatttgttctctggcttctctgccttttctaaatccaggttgaacatctggaggttcttggttcatgtactattgaagcctagcttggagaattttgagcattactttgctggcgtgtgagatgagtgcaattgtgcagtagtttgaacattgtttggcgttgtttttctttgggattggaatgaaaactgaccttttacagtcctgtgaccactgctgagtttcccaaatttgctggcatattgagtgcaacagcggcatcttttaggacttgaaatagctcagctggaattccatcaccttcactagctttgtttgtagtgatgcttcgtaagatccacttgacttcagattccaggatgtctggttccaggtgagtgatcacaccatcgtggctatctggttcattaagatctttttttgtatagttcttctgtgtattcttgtcaccttttcttaatatcttctacctctgttaggcccatactgtttctatcctttattgtgcccatctttgcatgaaatgttcccttgttatctataattttcttgaagagatagagctctagtctttcccattctattgttttcctctgtttctttgcattgatcactgaggaaggctttcttacctctctttgctattctttggaactctgcattcagataggtgtatctttcctcttctcctttgcctttagcttttcttcttttctcatttatttgtaaggccccctcatacaaccattttgcctttttctattttttttccttggggatggtcttgatcactgcctcctgtacaatgtcatgaacctccatctatagttcttcaggcactctatgggatctcaacccttgaatctatttgtcacttctactgtataatcctaaggaatttgatttatgtcattcctgaatggtttagtggttttccctagttccttcaatttaagtctgaatttggcaataaggagttcatgatctgagccacagttagctcccggtcttgtttttgctgactgtatggagcttctccatctttgactgcaaagaatataatcagtctgatttcggtattgaccatctggtgatgtccatgtgtaaagttgtctcttgtgttgttggaggagagtgtttgctatgaccagtgcgttctcttggcaaaactggattagcctttgtcctgcttaattttgtactccaaggccaaacttgcctgttactctagatatctcttgactttctacttttgcattccaatcccctatgatgaaagggacatcttttttttgatgtttgttctagaaggtcttgtaggtcattgtagaatagttcaacttcaggttcttcggcattagtggttggggcatagacttggattactgtgatattgaatgcacagaggcacggtttactgtcttgtatttttcaggccagtgagtccctgcctttggtgccttctctttcctgcctttctgccccagacttctgtgctcagctctgcccctgttcacagatcccagggagtaactgttgctctcaaggccccatccacccaacacctctcgcccttgtgtccaagccctcctcacccctctgtgccgacctccatggatacatcagctggactccgaggggccacagagcctcttagagtctgccacactgaaaagaaagtggttgcgtcctgtttgaaactgcttctgattcccaggcgactcagtggtgatcgtcctgccggtgtaagagctgcagaagatgcagatgtggtccctgggctgggaagatcccctggaggaggaaatggcagcccactccagtattgttgcctggagaatcccatggacagagcctggcgggctacagtccatgggttcacagacagtgaccacagacacagctgagcgagtgagcacgcgtgcactgattgtagtgcctgcagctgcccagagcttcaggctgatctgtttcactcctcaccctctcttgctctcagtggtgacaatttgttaagcatacttcagggagtggacggtttttacatttagaatttgagatagccacagttgaaaaatcagacaaaataagtcctatgtatctcaagggcttatgaaagtgttgctcagctgtttctgactgtgcaaccccatggactgtagcccaccaggctcctctgtccatgggattctccaggcaaaaatactggagtgggttgccatttcctcctccaggggatcgtcctgacccagggatcgaacccaggcatcctccaggtagattctttaccgtctgagccaccagggaggccccaaggcttatgacgaagtgtttaatagttggcggccctgctggccctcctgcttctcagctgctccacatcttttctctggggaccacccccgatcctgccctcctcagaagccaaaatcctagtatacctcaaaggcgtgttcacttctctctttctgcccctcatcagccttcttgccctccctgctcagcctgactcagcgtggctgtggaatttggtcccatcatcttttattacgcttaaaaaaatcataaacatttcttcatgcttccatggtcatcataactcattttagtgactatataggctattgaattaatatgtcattaacccgtttgattatatggcattttcctttaagttttactcctttgaataaggctcatatgaacgtttaaaaatacatagttcttttcttttcatctgttaaaaaatttctgcagaatcagttgccaagcctggaattcctaaatcagtttattgtttttatcatcatcatcattactgttgttattattaggtaggtaatatgtttctcactaaatggaacaggattcttaccacagaagtagttctaatgtacagtgctgacaaaaaatcatgagaaccctggaaatggtacgttattgttgttctcagttattccttgcttagccctgctcagcagtttcagtctgaattatttaaaataaagaaatataatccagctttggcattttcattttccgagaaattaaatgaatgaagatccactgggatgaacagcaagacaaataagatgatgatttgatgtggatacagtggggctatagtcttacaaagagacctctctttgttttctctccatgaaaaactctgcagccctatgtgagttcgtgcttctcggactaggagggcaaaggagactgatggtagagcccttcacgggatcagcaggagtgtaaggaagtttaaaaagcacttacgtagtctctggaaaaaatgacacatttcctttctaagtaccttttggaaaagtttcaggctattgtttttaaaataacctaaacatagagcttggcaaaatgaacacgtttctaaaaatttttcttttctacattgacacagtcttagactatcagagaaaatccctctactagaaaaatgggtagaagaagcagcaagcaaaacatacaatgaatttaggtgcgtgggtgtaagttgtcaaaacagtgaaggaaaaggaagctgttttatcttagtacagagcatggcttccctagtggctcagaggataaagaatatgcccacaatgcgggaggcccaggtttgatccctggagaaggaaatggcagcccattccagtattcttgcctggaaaatcccatagacagtggagcctggcgggctacagcctgtggggttgcaaagagttggacacgactgatcgagtaacacagagagcatggcttagacattcatgaaggtagtttttgtaaaaataaagccacctggtcttgatactttgatacggtttattaatatcattcaggaatttttaatagtttgtgcctataaaatgttgctaaactgtgttgttgtgaatagtagattttgtttccaatttgctgctaagtcactttagtcgtgtccaactctgtgcgaccccagagacggcagcccaccaggctcctccgtccctgggattctccaggcaagaacactggagtgggttgccattttcttctccaacgcaggaaagtgaaagtgaagccgctcagtcgtgtccgactcttagtggacaattgtttccagtttgcttaatagtaaattttttttagtctgtggaatttgttgatttttaaaaataaaacagcccaacttaagcctattttaataaccattttttaaaccaatgagacatatcctaaatacaaaacaaatttctgtattacttaatagaagttatacaactttgtttaatacatagtttcttgagagtgctggaggagttgaacttaatattgttttgattttatctcagaagtgggagattttaatttgttgcccaaggaagtaaaggagtatgcctggaaaaagagaaagaaggaattctagatagaacgtgtgaatacagaagtagagccagctatcaaggtcagctgcctgatttgaaacctgattcgcaagcaaggatggtcttctcacagcctgaatgtgataaacaattttttcaggtgaaacacccccaacaaatagtataagtcttgccagttttctagcgtgtccgcttgagctgggtgcagagcacattgtagtactgatgtttgtcctccaaaggaaatactgctgtgtttcaaacttcctgggctctaggtaggtcccattttgacctcgggccagtttgtcattctgaagcttcatgaagttaaagcttgattttttcaggttagatgattgaatggaagaggtaggtgactttaaggttttctgctcacagcagcttctctgctgtctgaaatcatttttctttcaagaagacacagggaagagcacgtcccctgaggcctccactgaactactgacgcatttgtgactacaacttttggggttgatttggggggttttagaatatgtccgcattctgatccttagacccttaaaaccacacagatagggagcttgttaatcgctttgagtgaaggaaggtgctgcccggacaccctcatcttcaagtgccttggcctttactgtcctgtttgcaagtggagtagaattcttgaacaggccttaatataatttttagaaatatttatttatttggccgcactggatcttagttgtggcacgcaggatctttagttgaggcctgtgaactcttagctgaggcgtgtgaattcttcagttatggcacatgggatctagttccccaaccagagatcgaaccccaggccccttgcattgggagcttggagtcatagccaccagaccagcagagaagtccctccttgagcagatttaatgcttagaggagagctggcctttaacttcttataattccttctgtttcatcccctgtgttgaacatacataatggaatgtatccataagcattctgtactaagtaacaaaatactgtcaacaaaatgtgatattgtgttagtagttcgtgttagtatttcaggcctaaggatcatcattataagtttctattgatgattttaggtgagggagagtgaaagtcgctcagttgtgtctgactctttgcgaccacgtgcactatatagtccatggaattctccaggcaagaatactggagtgggtagcctttcccttctccaggggatcttcgcaacccagatatccaacccaagtatcccgcattgcgggcagattccttaccagctgagccgccagggaagcccttaggtgtggaaggccatgccagtgctactcatcctgcggtgtgctgcccagggggacgactgcctggagagaaaagtccttggtagggaggtgcgggatgagggctttggatgcaacctgagctcggtattttgggcacctgaggatgacagcttgctaggatgcggggtctgggtgcgggaatcacaagcatgtcagttgaaccccggatttgaaaccaccactggtggtctctgagcccacgggcaatgggttgcgtggctccttgggagttgttgctagtagttgacatacctgaggtgttctggagggtggagccctccaggtaacgtgggaggaggctgcactgaggcatgagtggtgggggttggatgttggtggatgtgccaagaacagaggcaaggtccagtgtcctaggctggaattacttcttcttaaaaacaagcagaaacctgcaacactatcacatctaaagaatagtgtcttttaatatcagatatctagtcagtgttcctgtttgcagctgtttcatgataacactggagaaggcaatggcaccccactccaggactcttgcctggaaaatcccatggaccgaggagcctgctgggctgcagtccatggggtcgtgaagagtcggacacgactgagcgacttcactttcacttttcactttcaggccttggagaaggaaatggtaacccactccagtgttcttgcctggagaatcccagggacaagggagcctggtgggctgccgtctatggggtcgcacagagtcagacacgactgaagcgacttagtagcagcagaagcatgataatataggcatgtatatgtaacagtttgaccgaatgaggatctaataagtctccacatggtgactacttgatgtgtctgttaaacctctgcagtggtaggctggtcctccatctctgtgtttcccccctttcaaattatgtgttgaagaaactaggtcatttgtctgcgagtttcctgcagtcttgcttttttgctgagtaaaccccagtggcggtggttattgtgttcctctgcatttcctatagactgatagttggatctagaggtttgaccagatgtattgtaaaataaagttggtatcatactgcatttatcaattttatatagggcctgttactttatattatatcatgaacactttcccatgccataagtattttttctatttcataacttcatttaaatggtttccaactagaaagatctatcccatcagttcagttcagttgctcagtcctgtccgactctttgcaacctcacagactgcagcacgccaggcttccctgtccatcaccaactcccggagtttgctcaaactcatgtccatcgagtcagtgatgccgtccaaccttcacatcctctgtcatccccttctcttcctgtcctgttccttctgttcatggaaatgtcttaacttgtgagatttgtggaagaagaaaactaaataaccgtgaacagtaaccaggaacccacaaatagtaacagagcggtttaaacattacctcaaagagtgtcaaattttgatttaagatgttgaactacaaacagtaaaaagtacaggtctgtttacacatgctttagtctgatctgtgtctcactttcccttttaattttggatgtgaacttgaacttcctagaacttctatcatggtataggtgctcatggaggagtctgcctgattctcgctttgtgaaccgtgtgatgtaggagctcgtttgatggcgcttgaccaaagagactgcgtgtcaccgagtcttcatggttcccgtgcagacgtggtatattaggatctgcttgattgcaaacaacgaaagtcacttgggttcgctgaagctgctgagggtgattgtggtgaggatgctggggcgtctgcctcacagaaccctcagaacccaggaggggcctcgagcagctggcatgaggcccctccacctgaactgtctccagcttctcttcagaggtcagctttattaacgtatagaattctccagtcccaactgcaaaacgtgtggccagaaacagtcattgcaactcctggagaggtgcgagtctgtttctctctcctggtttctgatttcccagggaaggaactgactaatctcttctctggtctgaccagtggtgatcagaggtgggataatgtagaggaaaatcccggattcaacttggcaaagattctgttgtgaccagtctgccgtggctggaagatgggacgtgttgtacaaatggcagtacatacactagggcctgtctccaggtcacataaaatagcatgatgcccgctgtgctgttcagtcatcttatttatttggataaatgagggtcaacatctagtctgtctttattacggtctaatcatttacaataatcttaaataagctgggcagattctgacacatgcatacacccacgtcaccacctctccacagcctgacacggccccagaaagttccctcgtatccctttgctgtgttctgtcctttctcagcaccggaagcagccactgttccaattttatcctcagagactagtcttccttgtctcgaacttcaaacagaatggaaacagagagtgtcagcacttagccttaaatgtatgctagctcaaggttgtaaacagtaattcagtgctggccgtgagccagaatctcgatgctgctggaaataccagagtggctgtgacagagctgacagtgagggacaagagagagcagggactccaggcgaaggcagagcatggctgtgctgggtgaggcggccggtgtcctgctctgagagggagaggcccggagcttccaggaggctgggtggagtgcaggagaggcattccttactgttcttctgagggcatgagccagaatagtaaacctgggctcttttggtcctgtgtcctctgcccgcctctgggcaggacctcctcatctcccgcgtgtgctctggtgaaaggagaggcccagtgactggtgtggaagggtttcctcccaaggccgaggtggctgggaactctcggtgagtgagcagtggtaacgggctccactctgtatgcaggtctctcccagttctccagaaacgttttctttccgtttacctcagctaccctcctcatttgggtgggatggccaagacaccaagtttgcggttggttgccaagagtcagtagtcctcagcgttgtttgtatatcgctgtatagtgagcactttccatgttattgatattatttagaatcctgactcctggttcttgcataacttaccctgtatagacataactgtaggtagctgttgggttggccaagaagtttatttgtttgtaagtaaaaataaaagacatgtttttcattttcaccaagaactttattgaacagtgtagtcagttaaccaaatgaactttttggccatgctgcaaggaagtctgggtttgctctagtccatggagtcacaaagagtcagacatgactgagcgactgaatagcagcaataattatatagagcgtgtgtgtgtgtgtgtgtgtgtgtgtgtgtgtgtagacatgtacatgctagtatagtacaccatgtactctgtatgtgtgtgtgtgtgtagacatgtacatgctagtatagtacaccatgtactctgtatgtgtgtgtgtgtgtagacatgtacatgctagtataatacaccatgtactctgtgtgtgtgtgtgtgtgtgtgtgtgtgtgtagttgtctaatttgtccaattgatacatgttataaagtcagtgggaaatagtattgaaaataagtttacttgggtggcaaagaggataaatttactaaagactactcattcttttcttttctctacaggaccatccgagtatggctgaaaagagacagcggtcagtactggcccagcatttatcacacaatggcctgtgagtagtcgcactgttccacccaagaaaaatgtctttgatgacttaaatttcaaaatgagcttgttggttacctaatacctacagcattgtgtgttaaaatgcaggaaaactccccttctcttgcaaaaaggaagctgagtcaactggtttaactgaatcaacttgaacaaaacttggaaaaaaaataggaagaggaaagctgcccacctcccccattttcctttgtcttcattttgccaacttacattagtagtaattttctacttagtaatagctgatactgacactaaaacaggattctgaacactcctttgcctcatacctggccttttatgctactttttcttaaactctgggtactgttgagaaatttggtccaaggcacgacacatcctaaatggagatgttttttttcccagtagtcaaacatgttctaaaaataaacccaaaatataaagcttttgtattgagattttagaagagccctgagatgtagtgacataaaattgcaattaaatcctgcccttcctaccaatctaagctttgcctccttctctcccacttctccatcctttcttgaaaaaaagatgtggcaccacccaggtccaagctgatgccacatggaaggcatcatagctacttatttctgggtggtttcggtccttaatgaggagattttcctcagttaaggtttcaatgttcagaagccctcccctgggaaaagatgcacggttctggggcaggctgggtgatctgttactgaagactattacgaagttctccaaagaagagcgcttgccagggccgaactccgtggacactgcagctccgtgaagagttactgcaggggctgtggggtgtgttacaaacacagttattcagcagactctattccgtcagcttgagtcacccttccaagcaccgcctgtcgtgatagcactttctcatttattgcagggtagctgcaggatttcgatcctataaacatttccacaaaggattagtagtttatcaggattttcctttgtcctaccttccactaacagcttgagcaggccggtcaccttctctgtcttgataaccattcaatgagaaccgaagtagactttttggaatactggtgtaaagctaactgttataaaaggacccttttatataattataaaatagttataaaaaactattataaaaagtaaaaaagaaaactgttataaaaagtaaaacttcattgtatgtatgtagcgtgttacgactacctgaaaccctaatcgtggtctattgtgcaggcagtagtatcttctgtcctgcatccgcatttatttgtggatgggtcaccttggttactcagtgtggaacatgaagtggccattgtctcagtaaatgtccttacaggcccatttaataaatttactttgggattttgggaaaatggggcaaaggtagatggagcaccctcatcttctgagcctacctttgactcaactggaaaaaaaaaaagtcttctcttagatgagtaactccttacttccaatggtgcagtgatgggtccatagctgggaatagccacagcaacctggggacctctaccagtgctgggagatggtttgccatccttgtggatggtcttattaatgctgttggctatgattccttcctcctcccccttcccttacacttcagattttgcccacagctcagtcttccttgagacctcagctgtggagttcatgctcttcagaacaaagagagtctaagatggatttttgtacttatgtccagtatttagtacagtgaccccttggcttgcatttcccccaaatacttagttcactttgtaactgatttctctcctgggacaccagaacctagcagcagcagcacactctcttccttggcttttgagtcttgagcacatggctttgctttctccattgccatcccttgctatcttggcttaactgtatcctccagaagtagctcccagaactctgtggctggaaggatcaggagaaaacaggacagagcaggcacggcatctgtgctgtgggcgactgacacctgcgtgtttgtatacatgcatgcagccttttgcttccagatggctggttattacctccagctagagcagtgtctgctgatgaaactgcaggaacactgccagaagaaagcagaatgaatgaatgttgagaaatttgcttgtctgttttagggtgacttttaaaattaaattcaaaacacaagaagaaaagtgcttttaaaaactactgcagattcaccagttgacattttagtggtcatccatggatttaaactgttccccatgatgaaacagaggtgatcagtaagcgaaaccttagaatattgctgtacatggaccaattatgaatcataacaatacctcatgtaacaaaaataactttcagaatctgctttagctgaagaaaaatgtaactgtcagtttctgtttctacgatgagctgctgctcagatgctcagtcatgtccaagtctttgcaaccccatggaccatggactgtatgtagcctgcccagttcctctgtccgtgggattctccaggcaagaatactggagtgggttgctgtttcctcctccagtaggtcttcccgacccagagatcaagcctgtgtctcttatgtttcctactttggcaggtgggttctttaccactagcaccacttggaaagcccatctactatgtgtctctgcatttttcttggtactattttaccaaatcatcacaatagctgttataagaaagattatattttcatcatttaatagacaaggaaacaggccagaggttggaattctagtccatgtgcatccaactccagaactgggctgctcaccacagtatggggtgagtccacagacttctcctacgaaggaccagacataaatattagactttgtgggccagacagtctctgtggcttctcaactctgccattgcagaatcaaaagcagtcataaagaatacatagatgaatgagtctggctgtattccagaaaaccctttgtttataaaactagagtttaaagcaaatgattttgtactgcagtgacctttttaaaaggtctctgatttgaaagatgatttgtgttttccttgtttataaaactatgttaacattcacattaaaaaaaaagattatacttaaaaaaaaaacagtttatctcactagaagcttcccttctaggaaaaaagtcagagcatttttatatactaaacaaataaaccaggaagccttgcctttttttttttttaaatgtgagatgtctctaacctcataaaattactcagcacattgtaacttttacacaaaggagaggttttacatattcatgggcagttttttataggattgagcataaaaagaattgaaaagaagcttaaaactagaacattaagatttagtaacaactgaaaagcaagcaaaaatgatgacagtgaatctttaaagtcgtcaaagggatttgatttgttgaagataattttgtgtgtgattattaaagagcattttgtgtgacaatagcatctgtctttgggcttccccagtggctcagtggtaaaaaacctgcctgccaatgcgggagatgcgggtttgatccctgggtcgggagaaggaaatggcaactcattccagtattcttgcctgggaaatcccgtgaacaaaggagcctggtgggctacaatccagggggcttgcaagaattggacacgacttagtgactaaaacaaacaaacatgtatctttgtggttataatccttaaacatgatcattctttgtagtttcaaacatcaatatggtggataagggtgtacaaacttgtagtctattctaattgttaggtgtgtagacaattttagtatttacatttcaatgagatagttcttggaatgactgaaatagtctttttctatagtttgatcatggcttctgtttctgcctttgagtacaatccagcatttcttccagttttcttcctttggtggagaatatctgccatggtagttcagttcagttcagtggctcagtcgtgtctgactctttgcaaccccatcaatcgcagcacgccaggcctccctgtccatcaccaactcccagagttcactcagactcacgtccatcgagtcagtgatgtcatccagccatctcatcctctgtcgtccccttctcctcttgcccccaatccctcccagcatcaaagtcttttccaatgaatcaactcttcgcatgaggtggccaaagtactggagtttcagctttagcatcattccttccaaagaaatcccagggttgatctccttcagaatggactggctggatctccttgcagtccaagggactctcaagagtcttctccaacaccacagttcaaaagcatcaattctttggcgctcagccttcttcacagtccactctcacatccatacatgactactggaaaaaccatagccttgactagacggaccttagtcggcaaagtaatatctctgcttttgaatgtgctgtctaggttgctcataacttttcttccaaggagtaagtgtcttttaatttcacggctgcagtcaccatctgcagtgattttggagccccccaaaataaagtctgacactgtttccactgtttccccatctatttcccatgaagtgatgggaccggatgccatgatcttcgttttctgaatgttgagatttaagtcaactttttcactctccactttcactttcatcaagaggctttttagttcttcttcactttctgccataagggtggtgtcatctgcatatctgaggttattgatatttcttccggcaatcttgattccagcttgtgtttcttccagtccagcgtttcttgtgatatactctgtatagaagttaaataagcagggtgacaatatatagccttgacgtacttcttttcttatttggaaccagtctggtgttccatgtccagttctaactgttgcttcctgacctgcatacagatttctcaagaggtgggtcaggtggtctggtgttcccatgtctctcagaattttccacagtttgttgtgatccagacagtcaaaggctttggcatagtcaataaagcagaaatagatgtttttctggaactctcttgctttttccatgatccagcggatgttggcaatttgatctgtggttcctctgccttttctaaaaccagcttgaacatcaggaagttcacggttcacgtattgctgaaggctggcttggagaattttgagcattactttactagcatgtgcgatgaatgcaattgtacggtagtttgagcattctttggcattgcctttgtttggtagttagagaactttaaactgttttcaagtggtaacttcatttataggatttttctcttttacttttttataagacgttttatttcaaagtaagctcaagtttgtttgtttgtttcctggcattcatttctttctgtggtcaattaaaattcttaaggctgaagtgaacccaaatatttctttttccaagtgttccattttctaaatcacttttaattttgatttttagcagaaggaggtgatttattagagtttctcctttctgaaactcattctctggcccacacttctggaagtttaggtggaacctggaaggtcgtgtctatgggaagagtcaggctgtctcagtcacatgacattgctttggacaaagaaacaaactgggattgtatgagtcactgcaaaacagaactttttttgatcattggggaaaaacaacagcaacaaataatcccaaagcagcctccccagtttgctcacatgccttggaacgggcattgtggtactggacacctctctttccgcagatgcccgctactgttttgcctgtgatggggaagggaggaggggcaggatgacccacagagtttgggtggcagacagcttctctaaacactggtccccacacctttccagaaacaggtaggattttcaatcagatgaaacttcatgctgactcccttcacccaaagtcatagaagtaacttggaaggttattaaagttaaaattcgaaactaaaacagcagaaagaaatttaataacattttttaaagtaaaacatctttgccctcttttttttttttaacctaagttgtacagctctttttaataacgtaccttgaacaatgacttaatgtgcttaactctgctcataacatggtctttgtttttctggcagctccctgctctgctatggcttaccatcatgagagtagacggatatttgtgggccaggataatggagctgtgatggtaggtagcttccagagtgtattcattgtattgacctccccatgttcaccgttggacagtttaaataaagttaacaaagaatgcccagttgtttggcattaggaaatgtttcattcagtacagatggtagacccaaaactggattaattctagaattaactagcattaattaataaattaataaactccagattttccttgacttatgatgaggctttgtcctgataaacccattgtaagttgaaaaatattgtaagtttaaaatatacttaatctactgaattaattacttaatctactgaattaattaatctacacctaatctactgaatatcataacttagcctcacccaccttaaacatgctcagaacactaccgttggatgaagtcgtctaacacaatgcctattttatactaaagtattgaatatctcatgtaatttattgaatactgtactgaaagtgaaaaacagaatgattgtatgagtccagaatggttgtaagtgtgtcgattgttcactgtcaggacgctaagtaggggctgtggctgcccttgtccagcatcatgagagaggatcatacggcttatcacccgtctggggaaagatcaacattcagaagtcaaagtacagtttctactgaatgtgtattgcttttacaccagtgtaaaactgaaaaatcataagttgagccatcctaagtcagggaccatcctaagtcagggaccatcctaagtcagggaccatcctaagtcagggaccagctgtatctccacggagctctggtgattgatggctcattctcaggctaacccacaatgcacagcctttgtacaggaaatgtgtgtgtgtgtatgtgtgtgtgtgtgtgtgtgtgtgtgtgtgtgtgtcagaggagggagaagaacaagatcagggactagtcattcagccaacaactcgtgtaactctttgaggcagtgcttctgaaacgatctttggtgaaggaccagatatttaaattttcagtttattagagattggtgtttttgtaagtctaattgtatgtgtgtgtatgtatatatttcattaagatgtaattcatataccataaaattcaccaaagtgtgcagttcagtggttttatagtatagttacaagattgaaagtggaagtgtagtcacccagtcatgtctgactttgcgaccccgtggactgtagcctgccgggctcctctgttcacgggataacccagacaagaatactggagtggactgccattcccttctccaggggatcttcccgacccagggactgaacttgggtctccctcattacagtcacattctttactgtcagagccaaggtgtgtatgcatatattacattgagatatacttcatataccataaaattcaccagtttagcgtgtgcagttcagtggttttatagtatagtttcaagattatacaaccgttaatagtctagattatttttatcagtgcctcccaccccccaaaataaatcccatatcctttaggagtcactctgcattttcccttccttcagttcctagcagtcagtaatgtagtttctgagttcattctaaacattttatgtaaatagaatcataaaatgtataactttatatttggcttctttcactcagcagcatattttcaaggttcatctatgttgtagcttgaattaatacttcagtcctttttgtggtggaataatattctgttgtatgccacactttgtttatccatttattagttgatagatggattatttctaccttttggctactatgaataatgttgtgaacagtcacataaaagtttgtgtgtgaacctgagttttccattttattgggtatacacatctaggaatggaattgtgggtcatatggtaactctgtatttaattttttacagaactgccaaactgttttccaaagttactataccattttatattcccaccagcaatctatgaaggttctaactttttacatatttaccaacacttattattttctgattttgttgatttcctagtcagtgtgaaatggtatctagcttatctagtttgttggcatatcattgttgatagcagccttttttagtcctttttgtttctgtaagattaatagtccccttttcattcctgagtttagtagtttgagtcatttctctcttttttttccaccagtctagctacatgtttgtcaagttttgttagttttttcaaagaaccagttttcactgattctctgttgatttgttttctctattatttttctagtctctgataatgtgtatcagctcttattttttcttcggtttgctttgagtttagtttccttgattgctattttggatatcacattactgagtgagaaaatttagaaggatccctggtggctcagatggtaatctgcctgcaatacaggagacccaggtttgatccctgggtcgggaagatcccctgaagaagggaatggcaacccaccccagtattttggcctggagaattctgtggacagaggctgcagtccatggggtcgcaaagagtctagcaggactggatgactttcacttttaagtttatccgcttgaatgtcatggcgatattaaattgctggaaagttttctgaacacttattccctaattttctggtactttaatcaggaccagtggtccacagacctcattttgagtagcactgctttacagaactgggaatggtaacagcaaagtaagatttagctcgtggggctccatcacgtgtgaagtgaagggtgcacacagagcggtgagagcgcaggttggcgcctgcacccacccggcccgagagcctgtagctgctaagccctagcgggtggcggggacttaaccaggagaggaggaggaggacttgcagacacacagggctgtgccagcaaagacagaggttttcgaggtccgagtgtgtgcagagaaccaaaatgaagcagcttggcagcgtgaaccacgtacgactgaagaggtggctggagcaggtcagagagccgtgcgttcaggttttactcagcactgggtgtcctgcagaatgctaactaagaaggaagtagacatggtccctgctcccaggggtcttttggactagtaagaaggacaggtaatacaaaagtaagtgtcgcattacaggttgcgttgagcgctgtggagaaaagaacgggagtgggaaggagagggtccagagaggggtgtggccctgcacccagcagacaggatctgcaggaaagagggcttctccagggctgtgacgtccagccgaggcctgaagggcaggcaggagacagccaggcagagcaggttttccaggagcgaaggtatgtgtggaggcgcaaggcaagaggtctctgtgtgtctgaggacttggaggacatcctcttggctggttggtgctgagtgacagggcagcactagggctgatgggacccggtgggctgagggcaggtcattcaaggccttatgggtccgggtgaggttttcaattttgtaaacccttgggaagctcttccagggttttcagcagaagaatggtgtcatttaatttacaaagatccccctggctgctcagtggagcacggactggagggcaacaagagtggaggtgggagggaattccctggtggtccagtggttagtattcggccttttcattgctgagggcccaggttcttccttctctggtcagggagttaagatccggcaaagctatgcagtgcagctgaaaaaaacacacacacgctctaacaccatatataaaaataaactcaaaatggaccaaagacctaaatacaagtataaggccagacactataaaactcttagaggaaaacataggcagaacattctttgacacaaattgcatttaatatcttctgtgatccacctcctaaagaaaataaaaacaaaaacaaacacatgggacctaattaaacttaaaagattctcaaggcaaaggaaatcataaaacaaaaagacagcccacagaatgggagaaaatatttgtaaatgaagcgactgacaagggattaatctccaaaatatacaaacacctcatgcaactctatgttaaaaaaaccccaaaaacccaatcagaaaatggccagaagatctaaatagatattactgcaaagaagacatacagatggccaagaggcacatgaaaagatgatcaacatcaagagaaatacgtatcaaaactacaatgagatatcacctcacaatggccatcatcaaaaacatctataaacaataaatgctgaaaagggtgtgaagaaaaggaaacccttctacagtgataatgggaatataaatttgtacaaccattaatggaaaacagtatggcagttccttaaaaaaactaaaaatagaactaccatgtgatctagcaatcccactccaggcatatatccagagaaaactaatccgaaaagatagatacaccccaatgttcattgcagcactgtttacaatagaagcaacctaactgtccattgaaagatgaatgggtaaagaagatggaacattactcagccacaaaaagaatgaaataatgccatttgcagcaacatggatggacctagagattatcatacaaagtaaagtaaacagatggagaaagacagatatatgatgtcgcttacctgtgcatggtaaaacatggtacagatgaatctatttacaagatagaaatagagtcacagatgtggaaaacagtgttgttagcagagggggaagtagaggggagaaataaattgagacactgggattgataatatacacacttttatatataaaataggtaaataataatagatagtatagcacagggaactctactcgatactctgtaatgccctataatggaaaggaatctaaaaagagtggattgtgtatgtgtgcctgttcgggtccattgtacagcgcggactcacacacattgtaaatcaattatacagccacaaaaattttaaaaatggaggcggaaatatcaattgttgtcaccgtctgggtgagaaggttgtggcagtgatgatggacagaagcagatgtcttgagctgcagctgtgacaggttgggtgcagggtggggagaggagcaagtcaggtgagggctgggattttggcttgagtgtctggtggatggtgctatcatttattgagaagagatggcttaggggtgtgtgggaagagggcattcagaacaaaaggacagtgaggaatcagtagtaacagttaagatactgggaagacaccattcatgggtgatgcaaaatgggccaaggggtgggaggaccagccaggacagtggttgtggtagctggagaagcagtaagtttcagttggggcagagagaggatgagatcaagacaggaacatgaccttggggatggctgttagcagctggtggtcgcagggagagccgtttccatgcagtggggtggtgccctggggtgcagtggattgaagggtgactggggtgaggagctagaaagcctgaatgtcgagtgtgggctgatctatagagaaggttttggctgggatggggtggcggggggtaaagaaagttttagcattgttaagagagttttgtgttcatttgttttgctttttaaattagaagaagtcttgagtgtatttaccagccaggaaggaaggagctaggctctctgcatacgaagttcactggacaatagacaggtggtgggaacagagggcgggctgcaggatctgcatggtttgggttgatgcccaccagtttttggctgctgtaaatccattgtgtgataataaatgctagtggtctcgtttttctccttctgaagatttttatcggaatatggtgatgtgcacacacataataagaggccagtagcaggcctcagatagcatctccaggaatggcagtggccatggatttacttctctatgggcccttcttgtggctcctggttcaagggtactctaccgccattatagtgaagtcactgatgtgaaactcttaagtggaaaggggcgatgtaagtccagtttagcattaattagtattgaactgttgatttcccatcagagactgtggtggtggtttagccactgagttgtgtctgactcttgtgaccccatggactgtagcctgccagtctcctctgtccatgggattctccaggcaagaatactggagtgggttgtcatttctttctccaggggatcttcccaacccaggagttgaacctggatctcctacattgtgggtggattctttactgactgagctatgagtcccaacagagattagtatatataaaatgccgattcatttttgtactttgtagaaccaagatgaaggataagaaatcaatattcctttgtggagtgtttttcatcctgaccaatcaacaatttataatgtccatgttatctagacagttaagagcttaccaatttagcactgatcaatttcctaagtagtgcattttctttagagttttatcttagtcttatgcctgaggctcatttttttcattaagaagcacatacttttaattttttcctagttataaagtattacacagtccataaaaactttggaatataaaaaaggaaaaccatcacaatctttaaatttctttttttcttgtgtgtttgtgtgttaaatatatgtaatatgccccatctattgcttcagatacccaatgccttattttcactggtgctgagaactgttagtaatgggtctttgtatatcactttactttggttatatcatcttgagaaacttttagtgacaccgaaagagcaaaattaacaggatgcctcctttgcaattagaggggaaggaagtgtagagcacttgtttgtagagtaagagttagaccaaaattctgtggtggtcagcagcactttctttacttgtctggttccaaaataaatagtgttgcaaggacaggaccaagaagcaattctctactgttcttatggagccaatcttgagtcataaggctggtgatggccagttttagattttacatccttttggaagataagttcccattgtttttaaaactataactgttctcttattgcatttttttacttttaggaattccacgtttctgaagattttaataaaatgaactttataaagacctacccaggtaattataatacactcatttgcacacatacacacgtagatacacacaaaaataaactaaaacaccatgtcctatgatcaaaattaggttttcacattaactttttaaaaggttggttaccccagttacatgagaggctgttatctcttcagagttatttacacatccttttcctgcttattaacacttgaaattttgtatactgttccactgggtgcacgtgtcagatttagtttaaccattgctctatttttgaaaatgtgtactcctcccatcttttgataacacatactaagatatatgaagatatgtacataggtatgtgtgtttacatatgtctgggtgtattttatacatatgtgtgtgtaaaagtaatttcctatatatgtgtatgtgtgtccttgatggttactgactcagatcctgtaactcttattactttaagatagattactaaaagtagaataactgggtcaaacattaaaacttttttttaatactctagatttattttgcaaaactctttccagcaataggataaatattttaatgagtagtgatcgaaagtgcctgttcattaagtcttcattgctctttttaaatgcttattgccagtttgatagtcaaaatagttctgttttaaaattatttaaactttatttgatattggccatttgttatgttttatgaatgtctacatgactacacctgcattcccagggggttgtagtgttctctggttaatttataagaaacagtccctctgtttttctgaagcagcctgtacagctgagagtaaggtcagatgtgtctctgtctagcttctgacttcattcatcagactgggcatttattaaacaccagctgtatgcaagaccctgctccatgtaaagtagacaggtcactgccctggtatggcttaaaattgacctggagatagaaatattccagaagttaagtaatagaatacttccttattctcagctattactttggaatgtggaactttacaaatgcttcatcttagaaataatgaaaagttaatttcagaaaatttcagttgcccttttcacaatgccagtgttttctaaagagtcaaagcactaaaggtacagacaataaaaacaaacaaacctgttctgttaagaaaagactactgctttccatatgaaactcattgatagttgcttgaggtttttttaaaatctgtcctctgatatattatttgaatccctcttgagcattattcttttaaggatttgtagcttctgatggtctcctcccttgcagggaggcagagggcagggcctcagaggcctgcccattagatcatgggttgggggtcgggcagattctctgccacctgttcagagtgcaggctttccggggtgggcctgtccagtctgtgagtctgcaggctgaccaggtggagaaggggagccccagttcccacccactgagactggatcgcccaggtcgtgtttcttctctgttcccacagctcatcagaaccgggtgacggcaatcatcttcagcctggccaccgagtgggtgatcagcacgggccacgacaagtgtgtcagttggatgtgcacccgcagcgggaacatgctcgggaggcacttcttctcttcctgggcctcgtgtctgcagtatccttcccggtctcaggagttagctctgcatctgatcctcaactgctaattgagatctaaaggctaaatgattcctatgtatttcacataaaattgaagaatttctggctctcctttcttgggtataaagttggtttattaggacttggtggttaagacttggcctcccaatgcagatgatgtgagtttaatccctagttggggaactaaaatcccgcatgcctcttggccaaaaacccaaaacagaaaacagaaaaactatggtaacacattcagtaaggactttaaaagtggtccacgttaaaacaaacaaaacacttttaaaaatggtttattaaaagtaataaatgaattgctggtctctgctggggtgtgctataggtgttttaatacggaagtctcagaaaatctaaaccttgttcatacagacccctcccttcattcctttgttttttgaagtgaaagaaaagactttctgttgtgtaaagagggaaaaaaaaggaatcaatcttctagtagtaggttatttgcagacttggcaagagaatacaagaatttgtgaccctggaattcataaaagggctacaaggagttttttagttttcttgtgtgtgtttgaagagggttcataatctttatatgactctcgaaggtgcctctggatccctcaaatgttaagaaattgctgctctgaaattctgctgctctattggatttgtttcctgtagagtgtgctcttgcatcaggctgcctgtggtagctgtgtatcttagtgctggcaaggtaaaggctgtcagccacaggcaaacgccccatggtattttctcttttcttccgtgttggacatctggtgtagtgaaattctttcttccattgagagcctttataaaaatgtttgctacaaatgaatgtacagcatgagatatttaaaacagtaccatacgctttagacaaacaagggaagactactcagatatatcatgtgctatataggctttctgttaatgtgtttcatatggattgatagaaaatagcacagaattgcatcactgtggcccagcctgtggtcttccttttgatccatattttggaattaaaacaataattatcttattgtgtttagatacctgatttgccacaaactgctatggccatagagtaaccaagtgttaatgacaagttgttaccaagagttaatatatttttaaattttaaatttactactgccccaaatgactgccttttggatggctaaactcttcacagcaatttaaagtaaaccatcctcttcacttacatctaggcccccccaaaagatgagttcacatcatttgctctcagttttacattatttccagagataatttcataaaaggcatttttcttccagttctttttgactgttttcattattattttacattttaaaactttaatatgattacttatttttatgtctctctctatcagttcttttatcttttttgttgccaattcctaggatatcagttgaaataataacaggtactcagtgaatgcttattgaatgaatgaatattaattttcctgataattctagcttaaagcatttttttctttggtgtttccatgctgtatgattttcagtggagtgtttcttttctcatagttttaggtttgtgcttaccgtttatagaatgtacattttctgctttgtaactttgagatggattgtgttatacatccttgactgcttctccacagatatgactttgatactcagtatgcatttgttggtgattactctggacagattaccctgctgaaacttgaacagagcacctgttcagttattaccacccttaaaggacatgaaggtaggctgtgtggtcactgctgtttttcacctaatatgtgtgcatgcgtgcctgctcagtcgcttcagtcgtgtccggctccttgcagccctgtggactgtagccctccaggctcttctgtccatggggattctccaggcaagaatactggagtgggttgccatgccctcctccaggggatcttcttgatgcagggatcgaacctgagtctcttgtctcctgtgttggcaggtggtttctttaccaccagcgtcacctgggaagcccttttcacctaatatgggcatccaaatctagttctgggctctgtggtttcatgaatgattagctccctaagatcgtatcaggtttcagtttgactggccagatatgggacttcagtcccagaagatcttatgaaaactaagtgaaggcaaggtatggggttaggtttcatgatcccttctagatttgtctctggtgtgacatcactttctgttctgtgccccttttttgattagtttcagaagacctttttaaaattttgtataaatgataagacctttggaagaatattgttattactattttaaatttgtcgctttttaggacaccacgcaagacacagtaggtcagtcagtacaattggaagtgtatgagctggttctgtctttatttgggaaacatccactggggagggactgagggaaaagaaagactgggtggaattctgctatttctgtagcatagtgcgttggcagggcttcgtggaaaggttttaaagctcaattgactgtatttcataacagattagaagctttgagaccatctggttcagattgaagagttaggagtttgttgaaggaattaatggtggattgatttatgaaaatagtgtttttaagtatagcaagtttaaatgtcctctgtaggtaatttatttagataaatctgagtctgtgaccttgtagaggaaaagagggagggaaggacagtaagtttgagtagataaatctaaaggcagggaaacacaggccctcagaaaccactttctgtttatgactcatggtctcatgatcccaggctcttaagtgttctctgggttgctcaggacagaatgagttctgataactactcagcagggttcatgtagaaggagctggcttgtctgctgttaggctctaactgaaaaacatgggtcataggatcaaacagggctagggtttctgcagaattgatccctgaagccagttttgcacagtacttcttttttcactttggttaagcttctgtgagaaacagtctcttgtggtttgcttttgaatatggctttaccagttttctatacacccaccagaaatactgttagcttgtgtgactggtttcataagtttattaatttttctaggcaggcagcagttaatggaacaatgaagagatctgttgaaagagaaatctggaagatttttcccaagggtatcaaatttagtaagtttagtcaatatagaatgtgaaacgtaggatttggatttttacctacattcgctggcataatcatgtggtacaatttcacttttttttcccttcctctaagatgcttaatttccttaaacagaggcaacctggagtaggacacccgcaaggtcccagagacctggaataatccagacttttatcttagaaaacccctgaaaccttcactgcctttgctctttagatactggtagctatttttttttcccaccttcaaaagctttttctgaactaaccctcatgtacagctattttatagttttttggtatagaggaagaaaatcttcttttaaacacctttgtgttcagagtagtttgatgtgcaactaccgaaaatcctcgtcttgtagcttgggtaggggctgtgctgtgcctcctctgtgactcatgataaagcgtcagacgctgatttatgccacaaagatccacttttacatccagactcagctagtcctggttccgtcttctgttgtcagttgtcatgtgccagtggagagtcccagctaacctccctctctcacccctagggagcatcgcctgcctctggtgggaccctattcaacggctactcttctcaggagcgtccgacaacagcgtcatcatgtgggacatcgggggaaggaagggccgcacgctcctgctccagggccaccagtgcgtgactggaggggtggaatccaagctggggcgaggcggggggaggcatgagtactctgagaccaccgtctccaaattgcatcctttcaggtgtccacgtgatcgggctttctcccacctttctctgccaaggagtcaccccagtgaaatgtctgcttcaggcagacgtgggttagagaccacgggtggggactttgaccttggaagatggcctttggtacgacacttaagccagtctcattagtggatttcattaaggaataatgtctggattgacccagtcctgcttcccctaagctatggcatttaatgctcatgtttttgccatctagtcttgaagacgaaccctttcctccttactgggtaggcttgtctgttgcttggctacgagcagagtcaagttgaaaagcagccaaggagaggaaaacttctccccacgaatctacaagtcaggaggttgtttcctagggcgtccagagaaggaggcagacaagcatgcaggagcagggccgattcccttatcttgtcagagtgtgtgtacgtgcgtgtgcacgcatgtgtgtgcaccagtaatctccatcgtgttcaagtgcttgttcttacagattatgtaagtaagtgagttacacctcccttaagagatcaacacctcttgagttctgaacacctacttgttcagaaacaatcttgtgcacctggaaagaaattatagtggttggtccagaaaactgtggtcaccatctcctctctgacctgcagttcttaatgacagatttgaaagtagtagcgtttatttcatagtaactgtttttctgtataatatattataaaatgcctggtaacgtatatacggggatccagatgaccataccaaatagtgataaaatgccagttgctgattccagcgaggggagacactggagcctgcatgaagacagtgtgtttcccagcttgaggcagtgacttctgtgtgtttgcagtgatagagtgcaggcgctgtgttacctgcagctcacgaggcagctggtctcctgttcctcggatggtggaattgcagtgtggaacatggacgtcagcagagaggaggtaagagagagcaaggcagggctgatgcagggaggcccacagcccgcctctcggttttccaccctttggctggagatgcaggcagtcccagctcctccccgctgtgcttactggttgctgtctaatgtggtcctgtgtgtcactctcactgtgtcctccactcactggagagtttccaccgggacaagcagtacacacagttggcgcatttaggctgattttcacagagaagtgcatggagagggtgctggagacagtccagcctgtccagggaatggacgcaggcaggtgttccaaggtggtgctccacatcttgggatgggatccccaagacactcaccagggacatcgctcatctgggaaaatatttccccattctctgcttttattttccacgagttctgtcccactgagtctgtgtcactatagtgttcttttccggagacctgcgtttaagtgccttaatttccttatctccgttccttcttccatcaagtgaaataattgaatgagatgacttctaagctctcttccagttatttagacagacactataaacaatctctcctttttttctattttaaataatgctgcagtgaacatttttgaccttgtcattgtatgattgttcagttatttatttcagacaaaattctgaaaatagacccttcgggtcaagggtatgaacagtcttaaggctctttatagattttgtcagatgatttccaggcaggatttccattttcatctttaccagcataggtatttgtcttttccaagtgacgtctaccacctatggtgtagagagtggcgttgattccaaagaagatttttttgtgagggggttagggacttatggtttaacctcagaagcatttactgattagctaaacgttagccctaaagtctggaaccttaggcacatatacctcgtaaatgatattgtattgtggtgcatatgggcttcccaggtggttcagtggtaaagaatccacctgccaatgcaggagacacaggtttgatccctgggtcaggaagatcccttggagaaggaagtggcaacccactccagtattcttgcctggaaaatcccatggacaaaggagcctggagggctacagtctatggtgttgcacaattgagcagctaatcaaaaacaactcatactctgatatcacacgatgtgttccaagtgctgtcctttatacagcgtgtaggtcagcttgctgcccactgcagtggatgccaggcgtgactgcagcattccccacaagccctgcacatgctgctttgtgtcacctctgattacttgtgagtctgattctccctgaatacagttgcatctttagcatacccttggggacataatcagaggggttcagtctattaaaaaaaaaaacagtgacattactttatagggcattacacttccagactttataattactgtgctctatacataaagattcttgcctaccagaaacttgcaatctagtgaaggaaatagattcccctataaataatcaaatttcattcgtaatctggagaagtactgattgctagtgttttagtgaccttgtgagacaagtcaaatagaggaaatattgatggcatgtctgctggttaatttctctatttgaatttcctaaaaagctttttggtaagcttagaataacttgttatgaaacacatgtaaaattgactcagtattacagaatgtgtaatactgcctttgcaaaggtttatctgaactgggctatgtatttgtcgcctcctagtttcatgcaacatcagcagctagtgtactgcgctgtttcagtcgctcagttgtgtccgagtctttgcaaccccatgcactgcagtgtgttaggccctgtttcctagacttgttgctcttcagtctaattctgagagagcaggaactcagggggaggatgggtagaggatgtgttccctgagtcaggagggaggagaccattggggcctgatgctactagtggctcttgtaagggtttagttacttggatttcagtccactgttctcatccttgctaagtccttttagaagtggaaagtagaagcagggttcttatttccaaggttatatgaatgtgaggttatttgtgtctctagggaaagaagagagtcccatcttctctttgggggccactcattcaaggtgcttcctgtgtgtgggggggactcttttcctctgaatcacttatagacagttatcccaaatcatgtgcacactggctggtaacactgtctcagtggttggcactgttggtgggaaagaaaattatgtcaaaatgatacagtattttagtagactttttggtttggtggttgttttgtttttaccaactgagtaaatataagtgcaaaagtaagcagcctctggtatatgagattctgaccttgcattagggttttctacaatttgtaggacttccttaggcaccagccgagaggattaaccccagattctctagccccacagtccttgctgggaatttctttctgagtcacctggaaacactgactgggtcatctccaacccacagtggctgttggccaccacacaggcaggttggaagcagacgatccttgcccgattgtaatcaaagggactcctttttggaaggaggcaagagacataaatgagcaagtagccatagtaaatccacatgaagaaattgtatttggagctagctgattacagaatggaaagtattttatacattagtgcaaaacagattatcagtgccctggggttcttgttacatcatctttgtccaggttagggaggtggaacaaggttgggaaaagagagtgcaacggtcagaatacttgaataatgttctcttttgctcttttcagcacaaaagaaaacttctctttagagaatgagcattcagtaggatggttcatgagagcttataccataacacttaatcctattaaaagaaacaaagttacggttatttcttgtattaaaatatgttccaaaaagtctatttatttctgagtttgtttttttgtccattatctgattattttaagcatagtttttctttccttgtgtccctgtcccttccagctcagcaaaatgatattcttccctaacccttagacagaattatgctccctgagggcaggaattcagtgccattggttgtcatattccagaaacatgtttggagaccctgttgaaatgaagaggaccatgtccagaggctgtgtagagtacagtggacaagcgtaaagatgggggctggaatcctacatctcctgggagcttcacccattgaccaaccatggacagtccacctcagtctctgagccacagtttctttgcctgtaaaactgagagaatgttgttctgcatctcctagggttgtgtcgagaatgaagcaaaataaaccccttggcacactggtgaacttatatggcacttgctgtataccaggcactgtgcaaagcactgcaaatatcaacgcatttaatgctcacagccttacccattgtgtactcatacttggatattgctgccatgaagatatttttgcactgttccacatatgggtggtgttgcaggagttacactggtcacaaactaagccgagacagtggccctgctttccttcgtttaaaggacgtttcctgcatttaaacgttcccatggtgttggcagcaggccccactgtgtcacgggttttccttgagggacgttgttcacaggcagggttctcaaaccccctcctctcttccctcatcacagaaatgagcagttctgcatcgggtagtaagcttgtcacgtgggtatgcatttcctcttcactctttctgtcctctcttcccacttccagcattgccccagtcagttacagaaggctcttctgtcttagcctgcttcattctgtttgtgggtcccttctccacccccacttaaggaagaaagacttttgtaatggctgtcttatgtagaaatacttgtaatgccatatctaaaataagaaataggaaagccaaaggttttgatgcaataggaaacaaaaaattaggggcactcactctttaaaccaccttatcgaatctgtaaagctgaccatcttcactgaagattttttaagggtcagtgtagtttgatttctctggttctcccatcattgtctccacttatcagataaatttttcttgagtgttaactttcacagtcaagaaaagattattccttacttcatgatctttggtataattttagagtattttctatttttattgcatatatattatgccaagtgattgaggtcaaatatgcaaggacaactcttaagagttcataatgcaaattgaagtcctccctcctgtctataggttgaacaatctaaaattaaacaatcttgaaaacattgcaaaaatggcaaagattactcaaaacacaaacatagtattgaatgaatatggaaacagctataatacatagagaagttaaaaaaaaaaaaagaaccccagtgaggtatagaactgttgtattaatttctgaaaacttggtataaataagcagatgctttgatgttgggtctgactttctcttcccctaggctcctcagtggctggaaagtgattcttgtcagaaatgtgagcagccctttttctggaatattaagcagatgtgggacacgaagacactggggctgagacaggtgagtagctggcatccatttgtcactgtgttaatcacatgttttgttatttatatgattagtataacattttatttggaatcgcacttttccctatgaatgctcttaattcctacatttgtgatgtcaccatcattgtgtaacaaataggagcagatctttcctgggcaatagtgagacttaactttcccaaagtatgccatcgctcatcctgcactgggaaagcagggatgtccagaaaacccccaaagcctatttgtaaagggatgaaagagctctgagtttagggctgttatttgttaaagttagtatttgtaccagcccagcacaaagtcaaaatgaacttggcctctaagccttaaactttcatgaacagacaaaaagtaacagattagccctcactggaatattctgacagtaagaattttagcttgttccatgtgagtgtacctggagcatttctgttaagcatgtttcaagtatgtactgttttttaattttgtaaattaattgaaaaaacatgttccagatagcctgtagatttcaaggaagctcttacccttaggtattcatgtaatactaaggttctacaaaaagcgtagttctacagcaggcttgaaggtagccactcaactcagactgaatgtaaatttgtgcaggtaagtaaaaatggaatgccaattttaattgcttttcttatgggttttaccctctctaaggaattggtggaaagtttgtgcgtgtcaagaaacttacttatgaagctactctctagcaaggtcagatacaaaactgccagtgtaggaattattttatcacttgtgacattctaatgcttagaaactgcagcagtattctgtctttagcctcgttctcacaacacatggctggtagtaactggtgggtgaagtagtccgtacttcaaaggaaacatggagaattattatgacttaacagctaatagaagagcatggaaaggtattggtcacaaaattttagtggtttaaaaatatatatatatgtcaaaagtagtgataatagctggactattttggaatgttcttgaagctcattttcagagtcataatttgaaagagtaaaagaaagagcaaaacatgattatggatgtttgtttcttaatgagggcaaattacatttaaaactttacttccatttataacttttgttataggattgtttttccttcccaaagtctctagctatttgggttcctaaatgagcttgaacttggttttaatgtcatttgttgtcatctaagccaaaaatatgaatgcataaatatcagtatttcaccaataacaaagcaaggatatttggaaatctttgaaagtgttgaaatagcttgcctttggtgtgttaattgatacactgaattaggggtgattataattcatggagaagggaatggcaaaccactcttagcatcttgcttggagaatcctatggacagaggagcctggcagccaatagtccatggggtcacgaagagtcagacacgactaaagtggcttggcagtatcattcaaggcacatcatccccaatcctgttccctgctccgaagggaaaccatgtgccttaaaacaagaggttaactcccgctctccctccttcctcccggaagcatcactgccggaagtgcgggcaagctgtctgcggcaagtgcagcagcaagcgctccagctaccccgtcatgggcttcgagttccaggtccgagtctgcgattcttgctacgactccatcaaggacgaggagtgagtgttcgcttgtctctgtcttactgtgtgttcatccgcagcgggagagcctgggaaatgacatgggtatgcaatcgacccttgcacaacggttagggtcctgtcctccatgcagtggaaaatctgggtacaacttagagttgggtgtagctgggtataccttagaccctctgggtctgactgggtataaaaatctggatataacttagaccttcctatccacgagtctgcagatcatttagcactgtgatatttactagtaaaaaaaatccggatataagtggaccagtatagtttgaatctgtgttgttcaaggatccactgtattgatcttttgtctcttgtaaacagtttccaaggagaggattctgccctggctttgtgacttaagacaagtctctcccaaacactttgaggaatgattctgctcaggccagccgtgagccagccctgagcctccgagccatcaagagtgctatgagggtcaaggctgtgtgcacactggtgggtggttgagcaggcgctctacagaggcaccccagcttcgacctgtgctcacattcatggatgatttattagtgggaaaaccctggagactcacattctctcccacataaagtctgacctagtgatctgtgcttaaataactgtgtacaagacatatctgtcccctattcagtcctgaatcagatccatgaaggcaggaccagcattttcttttgctccttttttaaaaaatgtattttattgaaatgtagttgagttgttttggtgtgttaatttcagccatgcatgctaagtcacgaagtcctgtccggctctttgtgacaccgtggatcatagccctccagtctcctctgtccatgggattttctaggcaagaatattggagtggggtgccatttccttctccacttctgctcctttttgaattatctttgaaagcagtagctgggcacaccttggtggatgcccaagtaggaaggctggtgtggtaccaccgctgctcttggtcagtgagctggtgatgtggccagggtatgggcttcggagtagagtgagggtcagcaccctggggcagcactgcctctcctgcctggattcgcggggagcctgcagcctgtgatctcgtgcaatgtagttcccctttgttaaaggttcttgttctgatgtctagggatgtacaagcctgtccaccaaaagaaaatcaaatattttgggaattttggaaaatcctttgtaaaactgcttgtgggaattccctggaggtccagtggttagacctctgctctcaccaccgagggtgcacgttcagtccctggtagagtaaccagatccctgaggtcatacagcacaaccaaaaacaaacagaccaaaaaacccccagaaaaccagtcctgcaacttaggctttctgtcatcctttaattatagttggttttcaaaaccatagctacgtttcggggagcaaattttgacactgttaccgtaaatatttcctttatgtcgctaagacaactcatccctcagctctagaaactgccgggtgagtttaaatggcctctcttctctctgttagtcggacatctctagcaaccttccacgaaggaaaacataacatctcccacatgtccatggacgttgctaggggcctgatggtgacctgcgggaccgaccgcgtggtgaaggtaagctgcctaattgtcccagttagcacctccatgcagactgctccactgacatgctgtgagtgtgtaaggcagttctgatggacaagctcaccttccctttggatgaactccccatggccaggtgaaagccctggctaacaaattgcatgtttgtgagtttccatgcccttcccggcggctcagtccagtggggtctccctccactgtctcagtctctccaagtaagctggtgagggcctgccacccctctgtcactatctgccctgagctggccccagggtcttccctcccactgcctggccttggctgacctctttctctggttgctccttccctggctaatggtcctttatcctggatagaatactccccatttataagaaataaccatactttcctttgttaaatccccgagtgactagcacagaaacggagtgtgagcgctttatcctgagtgccgttcttgagttataaaactgccctgcctgcacatgtgctcagctgctcagttgcctctagcagtttgcgaccctgcggactgtagcccgccaggcttctctgtctgtggaatcatcccagcaggaatcctggagtggggtgccgtttcctcctccagggatcctcccaagccaggaattgagcccatgtctcctggggctcctgctttggcaggtcaattcttttaccactgagccacccgagaagccctgtaaaactgtcatcatttgtttcataattttaaaaatgggttttttttcccagtgggctttttattcaaaataaaagtaaatcgtagtgaaacattattatgatgtaattcacaggtgttgagggaaatactgcttataagcttttattgtgttttagccaaccacattgtctggtcactgtgtaaatctccagaaggttttatagggaaagaagaggatgagttgtgtgtcttgacctgttggccagtgtaccagctgtctgtcctcctgtgggaccacatggccgatgccacctctccaggtcccccccttcttctcttgcagatttgggacatgacgcctgtggtgggctgcagtctggccaccggcttctctccacactgatgcgggggccagcggggtctgagtcttcgcaggggccaacttcccctacacacgacgcttccctctagctccacagtccttgtcacgtggatgaacagccagccactaaaatcaaatcagcatttttataaagaacaaaacgtgaacgtgtgtttttgggcatttgtggaactatccgtggggaccaacatagcaggtccctgaggagtggagttactgcagggagatgtcctgcgagcggcgagctgacgggtgctgagatggtaatttagcacaggagagtttcagaagaaaaacactgaacgaaagagttaaagcctagaagtttcttcaagcaattccaagtgcaaacacactcccctccccccagatttactgggccctcgggggctcccacgcatctctgcgatcagagcaggggtccagggaggaggacttgcgttctctcttgggggggtacaggggtcttaggaacccagagaccctcctcgtccactggc

SEQ ID NO: 147 - DNA, 8492 bp, Hippotragus leucophaeus
  source 1..8492: mol_type = genomic DNA
ggactccggcaggaggtgcggtcagatttcccgccctgagcacgtgaccatgccggctccgcccgtctattttgccccttccctgcgtgcgccatccccccttaccccgccttcggagactctcgcccaatggggacctgggtaggggccaggggcggccctggtgggcggggctgctgaggaagagagtcgccggagtcggacgttgaacactcccgtgggctcggacccggccggagggtcacctgccccgcgcaccggccgaacggcggagacagcgtacgtgcccggcgtgagtgcgtggcggcggcgcgtgtgcgaagcgagtgggtggtgtggccaggtccacgtgcgaccctgcccagcgacccccgcggctcagcgcccagagaatccatgacccgagatactcaggattctgcgccccgccccgagcggccgccgctccagttctcccgtcccttagtccccacagtcttggtcggtggccacgcattgccatggtgactgtgggcaacttctgtgaggccgagggacccgcgggtccggtctgggcgaagggtgggctcagcccctgcttcttcttcacgctcgtgccctcgactctgatggccctaggggctctggccttggtgccggcttttccatgcagacgtccggagcggcctggtggcgccgacagggtgtcttgggcggccggtcctcgcgtcgctccctacgtgctgcagctgcttctggccacagttcaggtagcgctgcccctagctggcctcgtgggccgggtgggcactgcccagggtgccccactaccaggctaccttttcctggcttctgtactggggactgtggccagcgcctgtggtctggcgatgctcgtgacagaacggagccaggcactgcagaagctagcaatgggcgtctggatcaagttcaggcacagcccgggtctcctgctcctctggactgtgtcttttgcagccgagaatttggccctggtgtcttggaacaacccacaatggtggtgggcaagggcgaacttgagccagcaggtgagggacctcgttgggggagggggaagcctggcgtgtctgctcacattgcttccacgcttttcaaatgcctttaagaaagggaagaaaggaggggccagtgctgctgggagctgatagccagctggtggggagtggcagtgctgagtcactgtagtcttttttaaagcctattagatgctgggcccctgaagaggacctgggtgtgtgtactaccccagtgcccagccgtgttacaaggagtgaaaatgggactttggccctcagtgatagtctccccgcctatgtttaattctaggttcagtttagcctgtgggtgctgcggtatgtggtctccggagggctttttgtcctggggctctgggcccctggacttcgaccacagtcttacaccttgcgggtcaatgaagaggatcaagatgtagagaggagccaggtacacctcaatttctaaaagttagggtctattgtaattccattccccgtcatcatttcttctcactgtaataactcacttctttcctaaatctgaatccctgttagcctttctgagcccatcaggggtcacctgtgggtccaagttacctgggagctataatcccatatgttttccttagggggtttctggctaatgctgttttgatttctgagctcccctcccctacatgtttcaccatcttaggttccatcaacagaggggccaccgaggtctacctggcgagacctaggcaggaagctccgcctactgagtggctacctgtggcctcgggggagtccagctctgcagtttgttgtgctcatctgcctggggctcatggggttggagcggggactgaacgtgttggtacccatcttctatagggacataggtgagagggaggaggtcaggttagcactctggtccttcattggcctggatggtggtggagactagcccagggaagtgtgacagagttgagaactgggtggtcagtagaggctgtggctggtgcctagggcagtttctcccaaagagagtgctagggtctctgagtgggcttggactcattttctccatagtgaacttgctgacccagaaggcaccttggaactccctggtctggacggtcatcatctatgtcttcctcaagtttctccaggggggtggcactggcagtacaggtatgagggactctgctctcaccctggttggtattggccactgtccttcctcccacaagcgtctctcccccaacccccttggtgctctcagacctttcacatcttgctgctgagctgacgtcattgggctgctcagccctaccgaggccttccttccctggctccccgcaggcttcgtgaccaacttgcgcacgttcctatggatccgggtgcagcagttcacctcgaggcaggtggaactgcgcctcttctcccatctgcacgagctttcactgcgctggcacctggggcgccgcacaggagaggtgctgcggatcgtggaccggggcacgtccagtgtcacggggctgctcaggtgccatgccaatggaaaggaattgtgggagggcagggctggggaagcaggtgaaggggctggtcaggacaacccacccagctggaggagttgtctctctgtcctcttttttttcttaaattataaaattaatatacacatgccctcataataattccaataaagcagacagaacaaatctctcttgaattccactcactagaggttcccactctatagtatgtagagttctgcttttttgcatttttttacatatggacatgtataactagtaggtattgtggaggtgtttcttaaaacagatggtatcatgatgtaggcatcatttctcagaatggctttatatcaaaatgttagggagatgtattcttatctgggcttccctggtggctcagtggtaaagaatctgccttccaagcaggagacacaggttcagtctctgggctgggaagatcccctggagaaggaaatggcaacccactccagtattcttgcctggagaattccatgagaagagttgactcattggaaaagactctgatgctgggagggattgagggcaggaggagaaggggacgaccgaggatgagatggctggatggcatcacggactcaatggacatgagtctgagtgaactccgggagatggtgatgaacagggaggcctggcgtgctgcaattcatggggtcgcaaagagacacgactgagcgtctgaactgaactgaggagcctggcatgctacagtccacagagttgcaaagagtcagacacaacttagtgattaaacaacaacattctcattcatacatgaagatcttttccatgcattgtaattgatccaaagcattctatagtttgggcatgctatggtttatttagccatatataaggggcattgattcttaaggggcatttagcttgattctagtctgttgctatggaaaacaaaacactctgtcaaaatcctcctaggtagagtcactggctctgagcccttaaactattcttcatcgcttgattttgcctcctagctacctagtattcaacatcatccccacactggccgacatcatcattggcatcgtctacttcagcatgttcttcaatgcttggtttggcctcattgtgttcctgtgcatgggtttttaccttggtgagtgctgagagatggcttggtgaaaccatctccctgaaccattcatggtgtgccttgagcgtgagtcctgccccgactcagatggcccagctttgagaggctgtaggtcagtgggctccattaggcccctgatgctcactgctgtgatggatgagcatcctctgtcaaggaaaccccagctctccctagggaaggacatcctggtcactttagattcccgctgtgaacctcaggtcaaggaggaacttcatgtgataggatgcggcttgcctccattggttcaccaaaactgttttcacacaggctttatgcagactgtgatgatgtcttggacacagccccttccctcagggagcttaagactccctcccttgggaatctgggtccctgggttatagcacagggttagtgtacacatgaccagcagcagacatacacatcgtctctgctgctgggagtgacttgctctcttctcccccctctcccttctgtcattctctagccctgaccattgtggtcactgagtggagaacaaagtttcgacgggctatgaacatgcaggagaatgctacccgggcccgggctgtggactctttgctaaactttgagacggtaacggagacctcggtggcagctttgtgaggtttggagatgtagaggagtgtgcctgggggtcgttgggactgaaaaggagcagggaggatgcaaagtgtgctgcttacaatcagggaggagggctggagaatggagctgaaagctgtggctgtgtgaaacagcactggtttgaaattcatcaggtgaagtattacaacgcagagagttatgaagtggaacgctatcgtgaggccatcatcaaatatcaggtgaggatgctggtttgaggcctactgagagcaacagccaggacttgtggaatcaccaggcctgagaggagtaaaatttgggctgtgaggttgatgtgcctgggctcaggttgggatttggtgactgtcaacatgtgtatgacagtccttcctgtttgtcattgcccaagactttagagtggaagtcaaatgcttcactggttctactaaatcagacccagaatgtggtgattggccttgggctcctcgccggctccctgctttgtgcctactttgtcactgagcagaagctacaggtgagggaattgtcctgggcctggggactttgtctaggccatcaggttcacgggtgggaaggaggtagggggtagctagtgggcagggtgacagcccaacagcctcctgtgacccaatcctcatccctggatgtccacaggtcggggactttgtgctgtttggcacctacatcatccagctgtacatgcctctcaactggtttggcacctactacaggtaacctgatgccagccctcacctgtccaggatgcagtgttatctccccagctcccaggaggagctccaaccagccctcttcttgcaggatgattcagaccaacttcatcgacatggagaacatgtttgacctgctgaaagagaagacagaagtgagtgaggagacaggagtgggtttgtagggagtgggagctggcatggtgttcctcgtgtctgtgagataccaggcctgtaatggcatacaacggtggcactctcccaggtgaaggaccttcccggcgcagggccccttcgttttcagaggggtcagattgagtttgaaaacgtgcacttcagttacactgatgggtgagcccctccccttccactgtcccgcagtccccttccccatgtccatttacacactgctcctccccttgccctgcccccccacttctcagctcgccaccatctgggaagacagtctgagcgagaggtggcagggcccagtagtagctgtagtggtggaggggaccctggcagtatagccagcctgccgaccattctcacccttccttgcaggcgagagaccctgcaggatgtgtccttcaccgtgatgcctggacagacactggccctggtgagaggggacccagccagctgacccagactccttgagcttcccttattccagtgcccatggtagctggggacccaggctgtggaggtcagagagccctgtcttattgggtcacaggactgaatgtggcagcctccatggacattggtggcctcttggagagaaagcctttagccaatgggcctgagaatgtttttccatccttttaaaaaaaattttttttttttggttgtggtgggtcttaattgctgtgtgaaggctttcgctagctgcagtgagaaggagcacaggcttctcattgtggtggcttctcctgttacagagcacaggcttcaggcacatgggcttcaggagttgcagcatgcaggctcagtagttatggctctcgggctctagagtataagctcagtagttgtggtgcgtgggctgaggtgctccgagacatgtgggatcttcccagaccagggagcaaacccatgtgcccaggtgggcagattcttagccactgcaccaccagggaagtcctttctccctctctttttcatgcaataggtgggcccatcaggagcagggaagagcacagttttgcgtctgctatttcgcttctatgacgtaagctccggctgcatccgaatagatgggcaggatgtttcacaggtaaggatgctcgggggaagactataatttaggggcccatatgtgaaagaacggtgggtgctgggcatccagggagtagagaaagagctgtcacccctgcaaaaagctgggtcaggagacctcagcctttctagcggcacatggtctggataaggaaaatagtcacgggagtgattcctaggatgctgtatgaggcacaaagatctgcagccatccagggcagcagggagagaaagtgaattttctaccaatggggaaacagagagattaagtgatttgcccacacagctggggtctgagaaggtgaaggcaggactgacacgcagtctcatcccacgtgcttcccaccagcccatcctgccttccaggcctggagggatctcacaggccagagtatatggtcttttggccccaggtgacccagacctctctccggtctcacattggagtcgtgccccaggacactgtcctcttcaacgacaccattgccaacaatatccgctacggccgcatcacagctgggaacgacgaggtgaaggctgcagctcaggctgcgggcatccacgacaccatcatggctttccctgaaggtgagcctccccttcagggtctcccctggcccagttcaggcctattattgcctctgacctccattctaccccatccttgcccatctggtcacagaaaccaagtgtagtacgtgtgacttgagagaggtgggcaatttccacagggtatgatacccaggtgggcgagcggggactgaagctgagtggtggggagaaacagcgtgtcgccatcgctcgcaccattctcaaggctccagacattgttctgctggacgaggtgagggccctgagacgccttgccccactccttcctccctgagcctgtgcccagccattcctgctgagcactgttcttcatgtaggagagccagcacgaatgcatgtttcacaaaaacacttcacagttttcaagcgcaaaacaaggtcctttttgattcccgaggcctcagccagccacttgcatccttctcccaccagggatctggtgggagggacagttttacctaagtccctctctgtaggcaacgtctgcgttggatacccataatgagagggccatccaggcttctctggccaaagtctgcgccaaccgcaccaccatcgtggtggcacacaggtatgggatgggcagcaggtggaggggccccctcgggtgttgtggtaggtgactgacctctgacctctcaggctctccacggtggtcagtgctgaccagatcctcgtcatcaaggacggccgcattgtggagcgaggacggtaagggacacagcatgataaacagggatgggcctctgaagtgggggccccaaggaaaggttgtggaatcccaggggtttctggaaggatctccctcaccagttccttgtcatctcagactggtggcaaggactcttggggtacaaatcacaattggttgggacttacatttttctccttgccccaggcacgaagctctgttgtcccgaggtggggtgtatgctgacatgtggcagctacagcagcagggacaagaagtctctgaagacaccaattcccagactaaggcatgatgacaaaagttgtggccacttccttcctgagggataactctgaggggaatacactgtatccctcttccctgccatgtttcaccctggtcttggtgctagctacagtgatggaacggggactttcagaagagcattgtgggggaaataaaagcgtggactgttaggatcactatcactttgtggtgtggggaactacagcaggcctccactgcaggtcagatgagcattcttgatgggactcttctgtttttgattggaaaagagaaagaaacacaccactttgttgtcttatagactgcccatcctttattgtttctagcccgcctccctgccccctatacatggaggggagccccagtatatgggggatgacaagatgcaggggggccgagtgggacctggccagggagcagttcagagcagctcactcccatgcagctggagcagccagcagagccctctgtaggctcagctccacatgctgtttctccagatactcc

SEQ ID NO: 148 - DNA, 49439 bp, Hippotragus leucophaeus
  source 1..49439: mol_type = genomic DNA
ttttgtgaatatgagcttaaaattaaaaaaggaaggaaagataagtgattattaatggacttgtctgtaaaacatctaagtccccaacattagccccaagattcctaatacaagagttcattggtcactgtaaaatcctaatatcttcagtgtatctttaacagattttaaggaacatattaaccaaatgtacaagttttgatttggccataaaaatgcaagaagagctgtgattctctaggattaatgaataacatttgtttatttgatttgctctaagaaatcattctaaaatctgtttacatatctggcctctccaggatgagttttatgttggttcagcagattgtttacagttttctcttcttctcccttttttttttcatcttccctgctcagtgcccaacccaaggtcaaaggctgatagagagtaaatctcatgagaaggttttactctagggaagttgttcagtggatgggatcttggcgtacagagaaagatgacaggctctttctggctccttctcagccttgttgctgtaactgctgctcaatccaccactgaaggacaggccaagacatttttggagaagtttaaccatgaagccgaagacctgtcttatcaaagttcacttgcttcttggaattataacaccaatattaccgatgagaatgtccaaaagatggtgagtcctcatggctacagaggggtattggttgcttcttaaaaatcagcttactgcccaggaaactgaaaagggaaatcaaacaaatgctctgagctgtgagattggatgtttgcctcagtatttctgattctggagtcccagatgactgaaaaattgacctttgagtttctttgaaaaaatgttacaaaataattcactggtctcagtccagattcttggtgaacatgctttagaaatttaccaccataattcttatcatagtcaggctttcaaagcatgtcacagaaatgccataagttattcagttaataatttcctcaagcctacaatgtcaacaggaatatctaaagactctctacaaatcatctattaactgcaaaaatatgcagctggaggcttagtgaaagagctcgctagtaattaagattaccaggggtcgggtgaggctggacttgggaattccttccttaattgtcatggagttctgagggacttccagagcatacaagatccacagagccctccaagaaaacccgtaatcaaaccaattctgacaaatctcagaatgctctgggaaagcaagatgtactatttgacaagtgcaaggatttaggaagttccttccctcacatatctgaaagcagtgctggaaatggagtgacattatttaaggaaagtttttgtgacatttgtccagcaatgcgttctttcaaaaatgtagttcaaatctggttttttcaaatagtgggttacgggtttaagttaaatcactgccactcactggacagattctatattctggatagattcagtctgagatctgctgcttcatgtgaattccccaggagatttcccccccaaccccctgccacagtttttctaaagctttaagagatccaggagattttgacagcccagtgttgtcataggagaccatttttttttcttgtctcatattttggtcttacctttcttcatctcttcatgtttgcttttttctagctttgtatttgatcttgatgtgcactgtgcatttgttttcattctcagtcaaatggtccataggtggtattgaaggtagaccagcattgtgcctaagagctctggagtcaaactgccgaggtccaaatcctggctccaccgctgtctacctgggtgaacttaaactacttaatgaacctttctgcgctttagtttttctgcctgtgaaaagccacctagtactcatatttgcttcatagggttgctgtgacaacagttaacacacaaaaccaccagaattgtgctcaatgcttgtgggcctgggagaacgatacagtaccactgctgtgaatgtgagaaggaattctaattgctgaaaaaatgtgtaacagttctgttcagtgtccagatactgagaaggcattttacagaaggagatgtagcgatgtttgttgaaatcatctctggatcattaagtgctatcacttttgaattgcactggttgattagaggaaaggcagaaatgaaagggcataagtccaagaagggtagtcaaagtgcagacagtatgggccctttaaagaaaagtgaaaatatgcaaatacaagaagcaagcagggggcccagtatctccttcctccagcagtgatgaagggcgagttagcgcattagtgcatctgtgtggatttacctggggaggaggcaatagacagggaggacaacggctcatctgttttcttatcacatttattgagatctcctaatgaaacgggaactgcagctggtgctacaagaggtaccaagacaaataggaagctgagataatggtccactgctgatggccatgcttacagaaagaattggagaaatggagaatgttttccaagaaaagagccactggagtgatttacggggatgagagagagttagaagggaaaacagaattagctctacaaagcctaactcaaaaagaaaaccaacatgagtctgagatggaagaagaaaggatagaatgttcccagttgtattggccaactctcttcagattagaaaggtggtgcctttgaaagctcaaaagagataaatttacaataaataggaggaggtgctgtttctattacaggtagtgaaagtggtaagacttgtaaatctagaccattcttgaatctgaaaaagtgagacattgaaaactataaataggttttggaaatatttaagcaatgtaaggattgtagatccactgtgggtgagacatgcatttataaacccagttctttaccttcctcagtatcaatgcccaaggctatgtcactttacagtgtcatctcactgaaggtgacgtgactgtgtcctttgccatgtgtcttactttgaccaatgggctgttagcagaagtagaggcgtggaaggacttgaacaatgggacttttcctttgcacctttgcctttgccatgaggacatgcctggattgaccaggtaaagagtgagagatgtgtggaatagttgtcctggcagaaactaatcccccagagttttaagaggatccagccaaaattagcagagttgcctggcaacactcagtggttctaggcacacaaacaatgaacacttacgcagttgagattttgggttgtctgttatgtagtactattgtagcaatagataaccaatataggaagagaaatttgggctgtatgacatgtgtatgttcatatcccattatggtcacattattgtgggcaatctgtcatttcataattatcccttggtataacgttcagagtcagagtgttgggcttatcagccaatcgacctagtgtggcaattcttagatcaagtcatgagaatagtttaaaataatagagggcactagaatttgatcagtatagtgtccccaaagctccctgtttaggagaggtccatcagatagatataatgaaaaaaactttgttcaaaacaggtttccacatagttcagaaattcaatgaaaattaattaccagacacttgctttagagcaaatacagttctcatgtttgagatcaagcattcaccaattaaactgtaattctcttctcagtaaaatgacattacttttttgcatttattgttggtttgatttttgaaagagtcctttgtaagtcaaaggatttttgtttctcttttttgcaaagtcagaagctctttggcaacatgggaggtccctggacaattttttcccctgtaagagagtgaaaggatcctgccactggcaggggcatcctggttctttgttccagtatttggcagtagctactacagctgcccccaattcctgtgggcacaactgtgaagggagcattgaagactgccctgttggagccccagaggtctcacaacacttcatgaatatttcttgttgagttatcagaagctgtgaagagacagcataaggcccacacttaccctttgggtggtcagggcccctagagcccttgggcacacctgcttcctggaccttttcctctgtctttagggtgggggcacagtgaacccagagcagggtcattttaaactgctattctgtacccaaggagagaacgcagacttcaaccctgtctgcaatgagtctgtcccacactccccaagatatgtaggcacctatgcataggtacaggggtggggcaaggtcagtgtgatgcagatacgatggaattcaggaaatctgatactatcctgattctgctaagctggctgtgatgcgttgggcaagtcacttactttttatctcataaatgtaagatagtagatgggcccagtcaagatttttcagtggataacagtggtgagtggataagtcccacatgtggagggttcacaggagtcaagtgcattggaggtattgttcatactagttttcctttgtcatgaaaacttgataatgtcccagttgagtgatgtaatttggtaaaattgaacttgagcaattcaaaatgacatgtttcgtgccgtccagatttgacactcattgatctgagcactctgacgggacgccaggcggccgccagctacacccagggagggcagcctagtggtcagggactactgctgcttctcagtgtgtgccaggtaactgggcaaaagagaaaacacttaattttggctaaatcgtttggtttggagcagttccatgagggtttcagatctagttctaggacctagggaataaagtgggttttctttttctttacttttactattaagggcttttataacaacagctttattgagatataactgtgtgctaagtcgcttcagtcatgtccaactctttgtgactccatggactgtagcccgccaggctcctctgtccgtaggatttcccaggcaagaatactggagtgggttgccattcccttctctaggggatcttcctgacccagggatcgaacccaggtctcttaatctcctgcactggcattggcaagcaggttctttaccactagcaccacctgggttatgtaccataaaattcaccaatttaaagtatacagttcaatgcttcttagtatatttacagaattatgcaaatatcatcactatctcatcttagcacattttcatcactccaaaaggaaagcacatgcttattagcaatcactcttcttcccctaaccccccagctctcagcaaccactaatctactttctgtctatagattcgcctattctggacttttcatataaatggaattatacactaggtggtcttttgtgcatgccgtagcatgtatcattattttgtcccattttactgccaaatagtattccattatatggattttactttactttttattgtaaaaattttcaagcacatatacaagaagaaagactaatatgttgaatctccttatacccatcacccagcttcagcaattatcaacacttcggccaatcttgttttatttttctacccaacgccatgtttattggattattttgaaggaataactatatgttttatgtaataaatgtttcaccttgagctcccaatgtaagaatttttaaataaccttaatagcagtttcatgtcaaagacttaacaataattcctcaatataatcaactatctaggcaatatacaaatgtaccctaatatctcattttaaaaattcagctggtttgctttaatcaggatctagcaaagtcctctcttgatcattttggcagatgtactttaagtctctttcagtctatagagcccgtcctcttttttttttttttttttgtaatttatttgcagaaaaattgagttgttgctcctagagaaactcccacatactggattggctgattgtgttcccataatgttgcttaacatgctcttttgacccttgtatttgctacaaatgtatagatctggtacagaggtcagcacacttttttctgtaaaaggccaagtagtaaatatttcaggctttctgagccctacagtccctattcaatcctgctattctagaccagtcaactctgccactgtaacacaaaagcaggtatagacaatacataaataggtgtgaatatgaaaactttatttataaaaacagatggtaggcagagtcctgctctaaagacttgatcaaaatcaggtttcccctgtgaggttttttaataggtgtggaaattgaatttacactactagcagggttcaggaatattgagccaaaaaattaattcagattcctagagctctggaaaaaaagaaggaaataaaaaaatctgtagggaccctttttagatccaaagctcaaggcatttctactttatgcaatagatacaaataaatttaagatagaccaaaaattaaataggaaaagcaagtcaagcttttataagaaaatataggtaacttttggttaggaatggtttattaagtgagtctcggttggaaatggtttactaaatgagtcttagttgagaatggtttattaaataaaaaacaaaaagatcaatctataaaggaaaaggctgagcaaataaatttcatcagaattaaaaacaaacttttgtgcaccaaaagacatcataaacacatacacacacaagacaagaagcagagcttgagaaaacattttgatacatataattaacaaaagattgacagccgagatatataaagaaattttactaaatgataaagacaaaaattcactagaaaaatgggggaaagatatgagcaacaaatgcatagaagaagaaattcaaataaataaataaataaataaatatatatatatatatatatatatatacacctcatatatatgtttaacctgactaataatcaggataacattattttaatagtgaaataccaaattgacgtaaaatcatatttgccaaaatatgatatctgtagaagttgaaacttgctttaacccatcagttgcactcccaagaattccacctggagagcctcacctgtgtactcaagaaactttatatatttgcagatttaaattaaatattagcaattttatatgatttaacctaatacaaggatgtatatggtaaaaagtattacttgaagacaggaaacgttcatagatcagaaattattaaataaatttgaacttggtcatatacttaaatattatacagcagttaagatcaataaggaatgtatacttgaaaaactggaaaaaataagtaatgctaagtgaaaaaagcagagagattttctttttttctcaactttattgagatataattgacatataacattgtgtaagtttaaggtatacaaactgttgagttgatacactgatatattacaaaatatatggtagcagtagtagcagtagtcttaactaatacctgcattacatcacatgattaccatttgagaacatttaagatgtattctcttagcaacttttgagtatataatatgatattattgactctaaccactaaataaatatgtctgaagcaactattataaagtattaacattttaaaaacctgagtagaggtttttgtgacatttgctatgttatttatactatattatatctttattatgaaatacatcaaatatatatctggtgggccactttctggcagggcctaatttcagaagtgagttttttttcccctataaactaaaattttttaaaaatcccacagacagagtagcctagtgggctacagtccatgtggtcacaaagagttgaacacaactaagcaactaacagacacacaaagtgtaatttaggattttatattttcaggccttgaaatgacaaagcatctctcaataggatgagaatatggtatccactacagttatacatagcgggtcagagagggttttaacttcctgtgattatactgagtaatgtgtgtcttgaccccaagcccccatcaatggctgcagaaacatttgctgtgttaattgctgctcttctgcctttgcacagaggcagtatgggatgctgtttatttgacctgtaatggttctttttgaaccctgtagctgtgtaagtaactgtatatgcttcaattcattcatcattcaaatcccaaaattacatatagctgtcaagcattatctaagtgacttggttggtatgtatgaactgactttgattctctgtgtaactgcttagctgtcagttttatttaggcatgggtaccttatagtatgaatatggaataaattgtaaaaaagattaaaaagaacagcttgagatggaacagtgtatcctcaggggccaaatttcaagacaacataatgtttttgtgatacaaagtataacacttctagtatgataatgataaataaaacatatcctcaaagttcccacatacattataattttaaaaaatgttttaagactgaggccttttggggattctgggttgtctccaagggagattgaaataaaaaaaatgctcttaatttgggatcaaattttaccagaaattttgctgtaaataatcctagattggatgaaaaagggtaggggctgagaggtgggtggtgggttatgtaaatgaatctgtgctatagaccaaactcctctttccatagctcattccttctcattcagacatggtacaaagaagactagaatgtgttaaatccaatctacagccagtggttaagagcatttagctttagaggcaaacatatctgtgttgattccctgattcttccagttaatagctgtgtgacctagtcaaaattacttacctgctctgtgcttcatttgcttcatttgtgaattggagacaatcacaactacctcacaagattgtgcagattcattgaacagtagttcctaaggggttgtgtgtgctcaataaagagaaatcattttccatttcactgtgactattctattcatctcttgtatgatccatggctgcaccgttcatgaaccactttcattatgtcacacacctgcttgcaacccgtaagtgactccctagtattcacaggataaaagtaaaatttcttaatctagaaaatgcagtcatgcctggagtcctgctttggaatctctactatttatctattgtgtaaaagattaccacaaaagattatctattgagtaaaagattaccagatcaaaacaacacacatttattatctcctgggatagtttagctggatctgcttctgagtcttacaagattacaatcaaggtcctggctagagctgtggtctcatctgcaacttaaccggagatgaatccactttcaagctaatgtggctagtggtagcattcagatcctcctatgctccttaggatgtcagtcagaggccatcttgaattcctcaccatgtggccctagccacgggatagctcacaacatagcatcttgctgcatcagtattagcaagggagattcttcaaacaagataaaaatgatagccttggaagttccctggctgtccagtggttagtgctctgtgcttccactgcaggagggaacgagtttgatctctggttagggaactaagatcccacaaacaaacaaaacaatcttatctaacataaacatgtataatccttcacttctgctgtattctccttgttggaagtgagtcagaggtcctgctcacactcaagggaagggagacacaggagggtgtgccaccaggaagtaggggtcctgggaaccatcttagagtctacgcgcctcaggatccaggattcagacgctggcaattagttgccggctctactgttcatttttcgtagctccttcttcacatacaaaaaatggaaatagaataattttctgtctcttggggttgttaagaaaatcaaatgaggtaaattattttgcaaagtactctacagcggtctgttttctgcctactttaagatctgtcttaagttccgccgcctccaggaaagtgaaagtcaagtcgctcagtcgtgtccgactgtttgcgacccgtggactgtagcccaccaagcctctccatccatgggattctctaggcaagaatactggagtgggttgccatttccttgccaaatctggtccctataacaggaactgtttggccccactcataaagtttatatggaatcataggcttttatgtttcactaatgaaacattcatgatgtgtatcttatctgcttgataaaacaataagcagcttaaggacaaggactttttttctataagtgataaagtagctaccattgtttagtgcttaggatgtatcagggactcagaggcattttattatttgttaaattttcttgtcctttcaacaaccctttgaggtgagttctactattactctcattttatggataaggtaacatgactcaggctaagtaatttgctcaaggtcacacagctagttagaggtgtctgactcgaggaatggagttcttacgtgcctcatatgctacctctttttatagtctagagaagtacagtgtagtaaggggttgctcgttttagcctttgataaatggaactgagcttgtccactgagagaagactgcattgaatgcatatggagaagtcaagatgggggcaagtgaaccctgctatcactacctgcttcttggtttctctggtgagtggataatcaccatggctaccaaatggccatgttcagggcagtcttgaactggggatcaaaattcaagatcagaatctctggtaaatcacagtactatggagtttcctacaaacttgttatttctcatggttctcatcaccatgagaagctgtattcttaggaattgcgctctgagctctgctgggctttccctttagagtgtttatcgttgaatccttgagcgactcacccacgtcacagtgctaaggccgtacattccaggaccccacaacataaatcatctgtgagaattcacttccagttctggggacaggacccttgggaaaacgaagcaaaaggccaggaagagagagtgaccaagagtggcttggtcacgcttaacctaaaccttgaccttcagcaaagtagagaattaaataactcaggaaatattagatgttccaccagatgttctttggcctgtatctcctatttgaacagtcccattctaacttcaacttcattttttgttgttgtcatttcagaatgaagccagggccaaatggtctgccttttatgaagaacagtcccggatggccagaacttactcactcgaagaaattcagaatctcacactcaagcgtcaattgaaggcccttcagcatagtgggacctcagtgctctcggcagagaagagcaaacgagtatgtgacatgctagcactgatcccaagaatggaaatactggggaaatcttaaacattagtatcactcagggctgcttactttatctgcaaacctagcaatgctcagaatagaaagagtgctgtgcctcggtggggtgatcacgtaatttatgctccaaatcgggatcctttgagagtgaagggggatgctggtatgttaggacacctcattaaactaggatagtcagggctctgcggtccatagatgcagtgacagaggtcaccttcctgaggaccaggcacttagtccatgtctgtgcttctcaactgcgagtgattttgcccaccagggccatttgacaatgtctggagatatttttgattgtcacaactgttgaagggtgttattggcctctagtgaggagggatgttgctaaacactttgcaaagcacaaggaagtccccagtgacacttgtctggtctaaaatatcagcagtcctaagctcgagaagcccgacatgtcatctcatcctccccaacccctttcattcttgactgtcttctgcaacttctttaaaatgtcgctaaaccaccccagctcagaccactttagggataggaaagtcgcttctttctaaaacatcatttccatatgtgggtccctctaagtaatggcaagattcttcctccattgagtgtaaagagatttacctccactttctactgccttctggagccaaatggctgtctcctgtaatcagttcagttcagtcgctcagtcgtgtttgactctttgtggccccatgaatcgcagcacgccaggcctccctgtccatcaccatctcccggagttcactcagactcacgtccatcgagtccgtgatgccatccagccatctcatcctcggtcgtccccttctcctcctgcccccaatccctcccagcatcagagtcttttccaatgagtcaactcttcgcatgaggtggccaaagtactggagtttcagctttagcatcattccttccaaagaaatcccagggttgatctccttcagaatggactggttggatctccttgcagtccaagggactctcaagagtcttctccaacaccacagttcaaaagcatcaattctttggcactcagccttcttcacagtccaactctcacatccatacatgaccactggaaaaaccatagtcttgactagatggaccttagttggcaaagtaatgtctctgcttttgaatatactatctagattggtcataacttttatttcaaggagtaagagtctttcaatttcatggctgcagtcaccatctgcagtgattttggagcccaaaacaataaagtctgacactgtttccactgtttccccatctatttgccatgaagtgatgggaccagatgccatgatcttcattttctgaatgttgacctttaagacaactttttcactctccactttcactttcatcaagaggctttttagttcctcttcactttctgccataagggtggtgtcatctgtatatctgaggttcttgatatttctcccggcaatcttcattccagcttgtgtttcttccaactcagcgtttctcatgatgtactctgcatataagttaaataaacagggtgacagtacacagctttgacgtactccttttcctatttggaaccaggctgttgttccatgtccagttctaactgttgcttcctgacctgcatacagatttctcaagaggcaggtcaggtggtctggtattcccatctctttcagaattttccacagttgattgtgatccacacaatcaaaggctttggcatagtcaagaaagcagaaatagatgtttttctggaactctcttgctttttccatgatccagcggatgttggcaatttgatctctggtttctttgccttttctaaaaccagcttgaacatcagggagttcgcggttcacgtattgctgaagcctggcttggagaattttgagcattactttactagcatgtgagatgagtgcaattgtgcggtagtttgagcattcttttgcattgcctttctttggaattggaatgaaaactgacctttttcagtcctgtggccactgctgagtttcccaaatttgctggcatattgaggtcagcactttcacagcatcatctttcaggatttgaaacagctcaactggaatgccatcacctccactagctttgttcgtagtgatgctttctaaggcccacttgacttcacattccaagatatctggctctagattagtgatcacaccatcgtgattatcttggtctcctataatagtcttcaaataaaggaaggcagatttttttaaaactatttgaggcttttttctctaacctaaaacatccttccatccgttgatttttttcttatatgatggtttcaagttccctaaccagtcctggttgctggcttcattttgtcagtatccttggactgaatgcagccctccaagtgggttcatctctgcatgaaagtgagcagcgatatgacatcctgctcttccaagacatagctctaatgtgccccctctttgaaaccattcctgaatttccaagttactaattcaccactccccccatcctgccacacctttttggtgacagttgtagcgtctgtcactctgttatgtaatcattgatttcatgactcgctgtggcatgtctgtggggctcttaaagaccagtgactggttcatgtcataattatcagagtgtaggacatagtagatgctcagtgaagcctgaatggaacaagaaatgcactactcggcgcatgtgtaggggagaaacattcttgggatttgggtagatctgttttttttttccagtcactccacatgtatttatcatatgcttataaaggcagtccatgctagttgatgatgggaaaatttagctgagatattccaaccctacataaaagaagatacttggccaagaagctgtgaacttctgtattttgaggcataaaaaattgcatgattgaaaagacatctctacattagcattctcttttgtatatcttccatttttaacattgtttattatctttaatttgtagttgaacacgattctaaataaaatgagcaccatctacagtactgggaaagtcttggacccaaatacacaggagtgcttagcacttgaaccaggtgggctattcattttgagcagtgattataaaatttacttttttttattccaagctttaaaaatgagattaacatcagatgatgatgttgtgccttttagatagacaatccaaagagggaaaaattccaaatgtgtgtgttttatcacacggatgctcttttaagttttaacaaaacttcactataaatcctgtcacactcaagtagtttaattaagttagtagttcaatgatctcagtggtttattttctctgcagaattattttgaagctcttataagggtgaggacacaaaatggattaaagatctaaacgtaagaccagaaactataaaactcctagaggagaacataggcaaaacactctctgacataaatcacagcaggatcctctatgacccacctcccagagtaatggaaataaaagcaaaaataaacaaatgggacctaattaaacttaaaagcttctgcacaacaaaggaaactataagcaaagtgaaaagacagacttcagaatgggagaaaacaatagtaaatgaagcaactgacaaaggattaatctcaaaaatatacaagcaactcccacagctcaattccagaaaaataaatgacccaatcaaaaaatgggccagagaactaagcagacatttctccaaagaagacatacagatggctaacaaatacatgaaaagatgctcagcatcacacattatcagagaaatgcaaatcaaaaccacaatgaggtaccatttcacaccagtcagaagggctgcgatccaaaagtctacaagcagtaaatgctggagagggtgtggagaaaagggaaccctcttacactgttggtgggaatgcaaactagtacagccactatggagaacagtgtggagattccttaaaaaagtggaaatagagctgccatacaacccagcaatcccactgctgggcatacacaccgaggaaaccagaagtaaaatagacgcatgtaccccaatgttcatcacagcattgtttacaatagccaggacatggaagcaacccagatgtccatcagcagacgaatggataagaaagctgtggtacatatacacaatggagtattactcagccattaaaaagaatacatttgaatcagttctaatgaggtggatgaaactggaactgattatacagagtgaaataagccagaaaggaaaacaccaatacagtatactaaggcatatatatggaatttagaaagatagtaacaatgaccctatatgcaagacagcaaaagagacacagatgtatagaatagtcttttggactctgtgggagaggtcgagggtgggatgatttgggagaatggcattgaaacatgtatattatcacatgtgaaatgaatcaccagtccaggtttgatgcaggatacaggatgctcggggctggtgcactgggatgaccctgagggatgggatggggagggaggtgggaggggggttcgggatggggaacacatgtacacccatggcagattcatgtcaatgtatggcaaaaccactacaatactgtaaagtaattagcctccaattaaataagtttattaaaaaaataagggtgaggacatgaatgaatcatgagatttcattgaacaactttatgaccttgatatttgccagcctttcaattctttagagatgaaaatttctaaaactgcatgtttttttcctttgggtgctttgtgataataggtttggatgacataatggaaaacagcagagactacaatcggaggctctgggcttgggaaggctggagggctgaggttggcaagcaactaaggccattgtatgaagagtatgtggtcctggaaaatgagatggcgagagccaacagtaagtttgctgggctgtggcagttctgaagctccctatagggctgtggggctattgctcatgaattaccaagcctgccctttgatataaggggtatccctaaattaatcacctgctgaacaattcaggttacatgtctccaagaggagaccactagggaataaagaaaggtgaattgacattctacactttaaagggcttgagagcgagaataagttaccaggcctcaaacaaatcagtagtctgggaagggctcaggctcctgagggttcctaaggtagtctgtggatggacagattctatttaccagaaaggatgagagacagagataccgtctctcctttcaactcccgtgtggctgcagttcattctcaaaggtcatttgtgtgattacctcagagtggtgtcccagaaagaaacaaatgagagtactttaggctggaaactgcggtcatcaaaatcttaacatggggaggaatttccatatctctcaagtcatcctcctgcctgaataatgagctcaggccatggcattgtgaggaaatttctgttttggtcgtttactgcctcctggggttgaggaagggaaaacagttttcatctgtctttctgtgctctactgccgcttaaactcatattctcaggccagaggcaaactggagactggaacccatcgccacatccttccatccaaatatttacttctctcctcatcttcctgatcattcattgccaatgagcatgtaaacattaaaatgccgaaaatacatttacaaagtttattagctgttatcctggcccaagctcgtgtttcctgataacgagacactgcatgaagcacagagatgggcccactgtggccgtgtccaagagggttgggttacagttgaaaatataaggccctaaacaaaatgagaatttaaagacccaatcacatgttttaaagctaaagatgctaactgacctatggagagagtagagacctggagttaggcgactaggagtccgcctctcatcctcaccagttgtgtgaccttggacgaatcctttaatcagccaagaaccagctgttacccagcaccatggggattgtaatactgaccatcttgtagagtttttgtgctcattagatgagataatgaattaaatttcaggcacattagctagtgttattcatttgtatccctttgagttgaaggccaataaaaatgtgacaggtctttggatttttttaacctcccaggaaggctagtctatgtatactgtgctttatctctttctttccagatgttctcattttcttctttttaaaacagattatgaggactacggggactattggagaggggattatgaggtgactggggcaggggactatgactacagccgtgaccagttgatgaaagatgtggaacatacctttgcagaggtaacgagacacagaagttcacatattgtatgatttcatttatattaaatgtgtataatcagccaaactgtagagaaagaaatcagtgaccacctggggctggaggtgggaatggagttgactgcagatgggtacaagaaaacttttgggaatattggaaatgttctaaaactgggcagtagagatggttgtccaaaagtatacttttattaaaactcacaaaactgtatactttaaaatgggtaagttttataatatataaatgatacttcaatttaaaaatgaaggaagtaggtagcatcttaaaatgaatatatatattttttgcatctgccttccaattggggcttccaaagtggtgctaacggtaaaaaacctgcctgccaatgcaggagacataagagatacgggtgtgatctctgagtcaggaagatctcccagaggagggcatggcaacccactccagtattcttgcctagagaatcccatggacagaggagcctggcgggctacagtccatggggtcacagagtcagacacgatggaaggaacttagcacgcacaccttccacgtggtgtttgtacacctccagatgtgttcaccactttattttatgcagtggaactagtcatcatctatatctggtaagaaggaatgctttcaaaatcttcagaatatttcagaggagaagaaattaaaatttagggtaattctactgtctaaagaaacccctgtttttagtgttgggaattggaaattggaatagggtattcttggtcttaaactgtcttcctgggcttttcagattaaaccattatatgaacaacttcacgcttatgtgagggcaaagttgatggatacctacccttcctatatcagccctactggatgcctccctgcgcatttgcttggtaagaaactcgaggaattccttgtctactttgctctttgctgtttccaccaataaggttgttattttggggtgaggcccaacttttgaaacattctgtcgatgaagttagtaacattatagaaatcatattttgaaagcactgtcttcaccagaaaagtcattttaaattgtcccctattgcattactttatacacagagagttgttttgtttggcctcaatccatggataaaggggttattaaagatcaccagagaatgagagtgaaaatggagaaaaaaagtttttgttttgttttttaagatcctcaggtttatttttatgttttaattcttttggctgttctgggtctcccttgctgcatgcgggctttctctagttgtgctgcgtgggcttctcttgttacacagcatgggctctaggcacatgggcttcagtaactaaagctcatgagctctagagcgtgggctcagtagttggggcacacagacttggttgccctatggcatgtggaatcttcctggaccaggcatcgaatctgtgtcgcctccattggagggtggatttttagccactggaccaccagagaggtctgaaattaaattgtgttgttcaacttgattggctgacccttgagctgagattttagcatcttgttgtcagacaaaagaagcttagttggttgggagtggtcaggggtgagagaaaagctctctagaattaaggtatagcctgagtgaaagcttcgtaagttggttgttcaactgcaacagtatcttttgctgcaaagtacttggtttggaatcatatgggtaatcaatgaaatcctcctcatgaagaaagctgcctagcttaagaggagaaacagtcttcagagaactcaggatcctgctgtagagctttggtagaccaggcaagacctggggccctttactgaactcctttattccttcccagagagtgatcaccctccctcctctctccctcaccctcaaagcctaggccaaagaaaatatctgtgtttggaaagtttatgtcctgcatacacagcaggcctactacaggcaagctaagttgctagtagctgattctctgtaggcaagcctctttcttagcaagaaggaatctggacaaaggagcagtggagactttttcctctaaagcaatatataaatactctctacagtgtctttggcaaccattctttggtaattcattttctgcttaaacctgtctggcgtgaagtggctcttgcttccttccaaaatagactcatctatcactacactgtaccaattacaagaaagtcctacgttatatggaggtgaaccaacacccctctcatgcctcccattcattctgcctaattctgtgctctgaggttacccagagtatgtccacttttcttccacaagatggccttctagagatttgtaaacaaccactgtcaaggtacagcatagttcctgacacaagagtatgtactcagtatattttactattattattgtcatcatgtatacactattttcttcttgtatgttaaatatcctacacagactttcaaccattcttaaaaaatctcacttttctacttgttctcatttggacaagcaaataaataaaataaaactttattgatgtccctcttcaaatatcatgcttagaactgagcagttactccagctgaggtttgaccaacatggaataaaggtggtgctgtgacttccttgttctagacactaattctgttcgtttaccttaaggtgatatttgcattttggaagccacgtcatactgtttgttggaccacttttggtcttttacatgtgagctgtgtttcaacctgatgtcaaatatcacatatttttataatagctatttcttgacagttgaagcataggagtttgcatctatctctattggattttatcttttaaaacatgaatttgttggcatattcttcaggtagttattttgctccattcctttggtgccagaattctggtcctgctgttacattgatttttttttcagatccattttctcttttagggtttctggccttggaatccagtttaacatttgtttgagatgtttgaaaagtcacccagttaagtagattactatagtatagtaataaaagtggaacttagttactagttactagcagagtttcctgaatgatcatcctatatgctctcacttttcttttccattatagtttattacaggatcttgaatataatttcccatgctatacagtaggaccttgtttatttattctgtatataaagacttgcatctgttaaccccaaactccgactccatccttcccccactccctcttccccttagcaacagcaaatctgtctatatactctctcttaaattcaatatcatagattactaacagtttaatttgtagtattttgtcccatggatgagggactatataaacctatttctaatctatagtagctatgatgtcctatatatttaatacattgtgcctttgaattgtgatttgaaatgaaagaaacagggatgattccctaacaagctttgcctcaccacatcactcttgccattttaaccttttagaggagacagtaaaagaagggaatgttgaaaatataaaataagagaagaggaaaagaggtagtgaaaggaagcacagaaactactgagttggccaaaaagttcattcatgtttttctgtaacatcactttttggccaacccaataaattaaatctagaatactctatggcctgtttaccagtcctacctcatgtgctatgtaaaatcatgtctatacttctactgtctttatcacatattaacaaatcttttttttaataggtgatatgtgggggagattttggacaaatctgtactctttgacagtcccctttgaacacaaaccaagcatagatgttactgaaaaaatgaagaatcaggtagggagaagacaccttgaaaactaaatcttcaacctcattcctttttatgctacctttctcttcttatgttataaagtcgtgtaaatgagaaaattttcaagcaattttaaatttatttcttatgtaggtgtcctttcatagaaaactagtttacaatgacagtgacatctagtacctagaataagtatggcattgatcttgctgagagtaactaaaagtggagatgacctggttttccattaagcaataagatgtgaaattgtgaacttataattctttctaaagttagtcattgctatgtagtcagtaacctctatgaataggggaaaaaaggatatctttaggagatttttacatattaaaaatcattattgttaaagatacgataagagtctgcaatggtttgcaaataaactttttgttaccatcttggaataattgttttaattctctgtgttcccttccattgatgaaagcatattatagctgtaattatatgtttttctttattgagctaatactctacaattttgggtagaatctataatcatacatctattagctgtgtaaaatttttccgaatcattgcactgtgatttacgttagtatttatgcattgcttgtgaacagttttaaatctgtaagcaactacgcaactaacaccttaacttgcgtaacatattcctgagataagtccacagcagaatgaaaacatgaagcttcaagagcccccaaactcctgcagctgttctagccccattttgcaattgagtagcagcaagggctcatttttatgtacctccatagcctgtctatggtgttttcacacccaccatctctcctaatgttatgtttacaacaaatctatgggactatcagggcaggtattgtgatagttccatgtcgtaggtaaggaaactgaggcttgggtaaatgattcacccaaagtcacaaagacaaccagtcagtggcaattaaggttggaacacagaatttgcagtctggttttctacccattcattcttcattcaacatatattaactgtgcttgccagtctacactcttctggtatacgttcgttttccttaagaataccatagtcaccaatagcaacattgtctgacgttaagcctttaaaggtaaaaaaaaaatccatagtgtctcttatacccagtttcatattttcaaggcagacatgagagaagaaattaacttgactggtttttaagatcagaggaagttttctgtgtcactaaaaagtgattcattaactatctaccaattatacaaatttagtttgactgatatatgcgccttatcgccaaagaagtcttggtcagctccagggacactggttcccagaaagatttgctgaatagcagacaccttctgctgcccttctgcagttccagaatattctgaaagtttaggttcctatacagactatgaagccaaggcccagctacccattggctgctgggtctcttgtgggcctttttgacttcgaaagcatgtgacttcatgtttgctttattgtttgtgtcttcctctgacacagacactaagaatccccagcctaatactggggccttgttcactgaacgaactcaatcaagggttgttgtctggagttgaacagtttttagcaaagagaaggtcattactacttgtctttatacctggagcataaaggcaaaaaaattcatacataatcgcagtctactcctgacattttaatgtacttcttcattaaaattatactatataagtgttttacatattttatcttctcattattattttaaaaaatcaataaaaattctttataaatccaatttatttaggttttctattccacaaaggcattgttatttacttagctattctggaggcttttttccacttttccctctattaaaaatcattttgtaacactttacaatttgtcaaatatattttagttgaaaaatagtaataaaaatcatttaaaatgtaattctttgacctaatttctgaaaatttcctaggttagttccctagagactggattactgagacaaagagtataaacactgtgaaagctgtctgtacatgttgccaaattgcctttcagaaaggctatgcctttgtacatacccaacaaaaaagaatgctgtgattttaatgctacaattaaatgctgttcttttttttccccagtcctgggatgcagaaaggatattcaaggaggctgagaagttctttgtgtctatcagccttccttacatgactcaaggattctgggacaactccatgctgactgagccaggcgatggccggaaggtggtctgccaccccacagcgtgggacttggggaagggtgacttcaggtagtgagactgacgttcacactgccagaattcgaacaggagacaatggagggatgaggatgaatttggattccttgtctgattctctgagcactgaagagaggagtgaatttttcttgaatagaggctgggagtccaggagaccacgtctgggtttctgaggaaaaggggattgtcatcaggccctcaactgcacctttagacagtttacctcgtctgaaataatatgcgttcattagagtttcacggtcataagtatggtggtgcccccattaggaaaggcttggtgcaaagatttatggaagataaaatatatgaatcagacattaatcccccctccccatttctttcttctgagtgaactaggacaggtggatggaaaatctggtatgtatcataggagaaatgcagagtacttaaatcgtttctttaggctttgcaggtctctgttgaaattactcgtctctgcccttgtggcatgcaagcagccagagacaatacagaaacaagtggttggggctgtgtcacagtaaagtctaatttatcacaacactggtcagctgcaggccagagcttactgactccagtactagggtaaggttgaaaaatgaggaagtgtatataagcttcctagcacaggctcttacacacagtagacattaagtaagtacctattcttataattgtgtcaaagagaatagagaaaaaccaaaattagaaaaagaggtcatattgggtgtataaaagagattgagtttgttcctgagcagtgggagtccttaaaaggtatcagggggatggtgtgctcagagtggtgggaaaatgacagcacctactggaatatgacccctccactcacctacctgaaactgctcttgccaagttgaaaaggactggtatctaattgccaaatgcagtctttgggccacagcagcatgagacagtgttggttggttgtctttgacgtgttttttttcactagtgtctgcatggtcctcccttccggacttctctctctgtccccttttcctctctccaccctgtacatcctgggacctcctggggcttgtccttggccctctttccttgccatcctacactagctccatgggccatcacatccactcccctacttacatgctaatgattcccaaatgtcaatttctagtccctcccccctcccttttttttttttttttttttactgcttctctgtcttagctgtcccaaacttctggccgtgttcccattcttttctcaagccatcctcattgagcacttctatgaaggtcagtctcttgacccttcctgccatctaccgggcaaactgctgtgctttaatcaaggtccagattgctcattgcatcttgagtcatgccattcctggtgcttctagaagactaggcctgcatttactcatcattatggccaaggccatgtctgctgatcacttgtagagcacttgcctcagagtttttgtagtagaagactgtcttcctttctttagtctgtgagtaggaggacaggattcagccctgcctatcactttatattgagcacctagaacagtttctagaacatggaaggtaggtcctcaagattcattggtcaataaatcttggaaatgtgatccatgctatagaaatcccatataactattatgatgaataaatgaaattcaatgaggttcacgttaatcttgcccatttttgttcaggatcaagatgtgcacgaaggtcacaatggatgatttcctgacagcccatcatgagatgggccacatccagtatgacatggcatatgctgcacagccctacctgctcagaaatggagctaatgaaggtttccatgaagctgttggggagatcatgtcactgtctgcagctacacctcactatctgaaagcgcttggtcttctggcacctgatttttatgaagacaatggtatgaacatttttcttatggcttcttttgggtattctttattctgacatgggcaaaggtatttattgtcatgcataggatatatttaatttttgccatataaaatataatgtaattatgggtaactggggattgcttctggttaaaaaaaaccagtatataacataacatgccaacttttgtttttgtgtctttgagaagaggtaactaagtgaatgatcttgggactctaagaatcatctaggagaaaacttttattttattttacttgttgttgtttagttgctcagtcatgtctgactctttgtgaccccatggactgtagcccaccaggctcctctgtccatggaattttctaggcaagaatactggagtggggtgctgttttcttctccagaggatcttccccacccagggactgaacttgtgtccctgcattggcagggggatttttttatcactcagccaccagggaaacccagaagattttttaaaagatgttaaaacagacccacagaactgaaatggcttatccaaggtcacctagctaattagtgtcagagctcagattgaattcccccagttctaggtaaaaacctcagtgatggagctggaaaagattctaaaaatcactttgtagaggaagcaagctgaaggcatgagagggaaaatagctagcccaaggccaaaaagcagcatggcagaaccagaaccaaagacctaatatacaacttttcccataatattatgggaatattatgggagttcttagggagcaggtggtagaatatgaagattggaagagactgaaactcttttttcatctagctgaagcatgaatttgccccataacatcccctcagatccaggccatcattcgaggcacctttttctctttggatggcctagacttgatggaacccaacaaattcatgagatccagattttttttctgtgaggattcttcgctcagtcgtgtccaactctttgtgaccccatggactgtagcctatcaggctcctccatccatgggattttccagggaagagggctggagtggattgccatttccttttccaggggatcttcccgacccaggaatcgaacctgggtctcccgcattgcaggcagacgctttaccatctgagccaccagggaagccctgtaaaaggacacttagaaccaaatatgttcttcttttccatgtttttctctcccctcattttagccatttgggacataaacatcagttctgctgactggtacatttagtcaatgaggtcaaggtcataagctccatctttgtgtggacagttcactttgccttgacttctgactccagaccttgataatctcacaagtgcctgggagtaggtcactgtaaagccatcatcatgtctgaaaaagtgtgagcacagacccagtgggtaatagacaagtagcagtatcctcccagaagtgagcaaccaaggaaaggggtttcacagtaaccagacctgtcgcctaattttaaatgatcattctcaagtcaattcacagaaaagtgttttatcatttttaatattccttgacagcaagcaaagatgattgaatcactggtttgaaaaattcctgcttctttccttggctctgctcctgatctgtgaattatatttgacaaaataaagtccttcattccttcttttcctctttctttctccctctcttcctttcttcttccaaaagtgtttactgagcacttgctacgtgtaaatcatttttttaaagacactagagagatacagtgataatagccccctgtttacattccagtaagctgcatttatacaacagatatgagctccactgcccttttacaccactgctgctgctgctgctgctgctaagtcacttcagtcgtgtcctactctgtgcgaccccatggacagcagcccaccaggctcccctgtccacaggctcctctaggcaagaatattggagtgggttgccatttccttctccatttataccactaataaaggataaatgaaataatataatttgttaaagcattataaactctgataaggaagatatttgtaaggcctgaggaaaccttacaaatagctgtgaaaagaagagaagcgaaaagcaaaggagaaaaggaaagatatacccatttgaatgcagaattccaaagaatagcaaggagagataagaaagcctttctcagtgatcagtgcaaagaaatagaggaaaacaatagaatgggaaagactagagatctcttcaagagaattagagataccaagggaacatttcatgcaaagatgggctcaataaaggacagaaatggtatggacctaacagaagcagaagatattaagaaaaggtggcaagaatacacagaactgtacaaataaaagatcttcacaacccagataatcacgatggtgtgatcactcatctagagccagacatcctggaatgtgaagtcaagtggccttaggaagtatcactatgaacaaagctagtggaggtgatggaattccagttgagctatttcaaatcctgaaagatgatgctgtgaaagtgctgcactcaatatgtcagcaaatttggaaaacagcagtggccacaggactggaaaaggtcagttttcattccaatcccaaaggaaggcaatgccaaagaatgctcaaactaccgcacaattgcactcatctcacatgctagtaaagtaatgctcaaaattctccaagccaggcttcagcaatacgtgaaccatgaacttccagatgttcaagctggttttagaaaaggcagaggaaccagagatcaaattgctaacatccactggatcatggaaaaagcaagagagttccagaaaaacatctatttctgctttattgactatgccaaagcctttgattgtgtggatcacaatcaactgtggaaaattctgaaagagatgggaataccagaccacctgacctgcctcttgagaaacctatatgtaggtcaggaagcaacagttagaactggacatggaacaacagcctggttccaaatagggaaaggagtgtgtcaaggctgtatactgtcagccttcttatttaacttctatgcagagtacatcatgagaaacactgggctggaggaagcacaagctggaatgaagattgctgggagaaatatcaagaacctcagatatgcagatgacaccacccttatggcagaaagtgaaaaagaactaaagagcctgttgatgaaagtgaaagaggagagtgaaaaagttggcttaaagctcaacattcagaaaacaaagatcatggcatccggtcccatcacttcatgggaaatagaatgggaaacagtgaaaacagtgactgactttattttgggggagctccaaaatcactgcagatggtgactgcagccatgaaattaaaagatgcttactccttggaagaaaagttatgaccaacctagacagcatattaaaaagcagagacattactttgtcaacaaaagtctatctagtcaaggctatggtttttccagtagtcatgtatggatgtgagagttggactgtaaagaaattgagtgctgaagaattgatgcttttgaactgtggtgttggagaagactcttgagagtcccttggactgcaaggagatccaaccagtccatcctaaaggagatcagtcctgagcgttcattggaaggactgatgttcaagctgaaactccaatactttggccacctgatgcaaagcgctgactcatttgaaaagaccctgattctgggaaagattgaaagcaggaggagaaggggatgacagaggatgagatggttggatggcatcgctgactcgatggacatgggtttgggtgaactctgggaattggtgatggacagggaggcctggcatgctgcagtccatggtgtcacagagttggacacagctgagcgactcaactgaactgaactgaaggaagatatcagtaaatttaaaattcatgatacttctgattatccactggataattagaggagggaggctgttttttctttgttttctttcctccctggtttactggcttttggccacatctgtttaatatccatttatttagcaaaaactcacacagggcctcatgtagcagacaccagtttaggtatatagtcttgaatgagacattgacagtcactgccttcatggagcttacaagaataaatagtatgactaggaaagcaggtgaaatagccctacttagctctgacaagaggtagttaaggaaggtagtactgaaactaatgcaaaaaacagggttacttgtggatttatttaacctattctatccaaggcttcaccctacttcaaatccctcagctgagaaaatgaataaatacatattattatgtccactgtcaatatttctcatgtgatcatgcttatagtaagtatatcttgaggaataatatcttgagattaggaaattattgaacacaaaatgtctactgtcatcctcatcttaatatttatcctttcccattttcctttcagaaacagaaataaacttcctgctcaaacaagcacttacaattgttggaactctaccatttacttacatgttagaaaagtggaggtggatggtctttaagggtgaaattcccaaagagcagtggatggaaaagtggtgggagatgaagtaagtcagtgaatatgcatgcaatcagtaaaatgttttctcatgaatttgctgtttatttacaagcatctaattggcctgtatagacatatacacattcacattaactacttgctttttattaagtctccatttgggtgccttcttctcagataacatttccttggctttgcccaccccctcagaagcagggtcaagtgacaaaatttctcatgctctatcttcttgcatgttgaggcacccgttaaactctgatattatttacgaagtaatcagtatgttcattttcattttttattttgtccattctttgaaacaaaaattaataaccccatattttaggtaaagcaccagggatccaagactgatcgtttgcaccagggatctgaggctgatcgattttgatgttctctttgacttgcaagagcttttagtttatggagggatgtggaaaatgaaaccactgcagtgtgctgaattgtgatggagggtgtggggatccgtgagcatccaaggggggatccaaagccctggccagtgagtcagatgaggagaggcatccaagctgaggtttgagaacaatgtgggagttaaccaggtgtacgtagaagggaagggagagaattccaagcaagtgaaagcctgccatatttgggcaacagatggtgatggctttcaatagtttcagtgctacgtcattcatcactatatcccaagtgctttgcacagggcctggctcagacacgtatgaaataatgatcaaagtactactgaagaagacggaaggaagaaaagcgacctccccaccatattagtcagactcctgttaatgatttttctttgtttttcctttttggagtgaagatctacaattataacatttagccccacgtccataagttgaagtcagtgccactattctgctaagattctttctgttgacataaatcctccttgggaggaaggagacagcatctctaataactgtctctagcatttaagtattaccaaaattatgtctctcatgatcccacaatcagaaaggacaaatgtattcaaacaatgccaaatacatggtttctgtacctttttatcctgattaaatttttgaccccttttagtttatttccagaggtacatagaatcaggccctgaaaatgattcattgtgctctattcatgtaataagtccacatgaagtcttttcttagcattgggcattgtggctggccctggaactataaagatgaccagaacacagccctgtccgctaggtgctcaagtctccagagcaagaaggagctgtatgtgaataattataaaacagagagagaaatggcaaaggaggcagagctagagaaggcctggggagctggagggcttgctgtggtggcaggtgcttggggtcaggggcagcacttacagatgagggggcatttgagctggccttgaagaatcagatcaatgagaagaatcagtgaggtttcaattttagaaaattctgcctaccaagagcccataaaatatggtgcaggagaggaatttttaggactttcactgtatggctttggtcacataatatactttatgaaattggtgttttgatgatacagctatttttcaatggtatagactggctgaagtaacaaaaaacagagatgattacatgatgggatttattctgtaattctttacactgtttcaatttcacctgaccacaaattccaatagaaatgccattgactgatggcactgcacaatggcccatctatactttctctcagtgagtgacccacagctaatataccttctttttcctccaaaggcgagagatagtcggagtggtggagcctctgccccatgatgagacatactgtgatcccgcgtgtctgttccatgtggctgaagattactcattcatccggtaagtgacagttttcttctgtttcacttctagaatttgtagacagggtgacaactttaatttctccatctccattcccctcccccttagaacctcaaaatagatgatcagtttcaattctatgtaactgaacatgatgtattgagttcaacaaaagttatatgagatccttttctccaccaacagggaatttatagtctccttgggagcaatagaaatgtttttgtttgtctccttgttactggcagagttcagggtggtcataatagagcatttttaacttgaagtcccaaaatctatgttcttcacctattagctccagatcttgaatttgttgagtctcagtttctttatttgtaaagtagaaataatattgatgatttgccaaaaggattgattggcatcagttatgtgaagaggctataaatcggtaaaacacaatacaaatgtgagctcacatttaacaagataatgctgcctttttatcagctgatacataaatgcaagtatcagctgatacataaaagaggtttaacggatacttctttggttgctggggcctcaaaatttaaatatatgtcccaatctatgactttaccacagaaactacacatgggacaactctttttttttctttatctcttttacaggtattacacaaggaccatttatcaattccagtttcatgaagccctttgtaaaacagctaaacatgaaggtgccctgttcaaatgtgacatctcaaattccactgaagctgggcagaggctgctgtaagagatgcttcaaaaatattgaacctctcatcctatttaatgttactcatttccatgcctaggttggaatttgatttctttgatccaaaaaagaaaatttggggactcaaaatgtcttcgtccatgaattaaatgtttgttttgtgatcacacaggaacctgcatcctgtgatggctagacaggccacctcctctccccatgtcataactacagagctctctgggggagggagattgaaagatgaacacatcttttaccatgctttcttgtcttatttgccaggagcaaacttagtcaaaccaaagaggagtgaccatagattgtacatgtaaacagatacgcatctggaatccatccaaaggccctgaacccaccttcccctgcctttttttttttttctttctttttttttttttatgtagccaaatgctgcgccttggaaaatcagaaccctggaccttagcattggaaagtattgtaggcataaagactatggatgtaaaacccctgctcaactactttgagcccttgtttacctggctgaaagagcagaacaggaattcatttgtgggatggagcacggaatggactccatgtgagtagatggcgttgacacatttctaatggccctttttctgcttccctagtcctctctggccctagtctcacgggactcacacagttgagtgtgttcttcctctacttatcccctgtactgtggtggcagatgccattttctctgggaggaaacacatttgttgagcacctactgtgtacccgacacagtgaaaactccccccttcttgttttcagtctgctttactagcccatatttaaaataagagtctaacagtttccaacccactgtatgtgaatcctgcccttcaaaggcaaatacgtttaacaattttaatgcaatcccctcttctttctggcagttacattcatatttctaaacagcttctttatattgtcatttctccattgctcagttttagacatgcatttctgcctactcttctgcctccatttcccattctcccaatgcaatttaatgtaatttttagtaaagaaattaccaacatttgcatcattatacctgtaaaacctagtaatatactattttatatattttttaatgtagctttttgtttgtcctgaagtttctactgtctcacttttttgcatgcctaatttgctgtctatactatattcttctccaactattccaatgtatctattcttttcagtctcattttttcctaaagaactccctcttggagtcctcctgtctccatctggaccacagttttcatcccaagttacccctttgctgctgtcctgggttgaatcctctccttcctggatgccatatcttctttcatgaattgcctcctgttttgctgcagcacggcctccaggtgactttctaagcaagagctcatggggtaggagcatcagctgttcccctaagtggctataaccagacctagattttcattttccttgttttcagtccagtatcttcttcccaccccctgctgtacctgaatcccaggcctttcctggattctctgggggtctctactgcttttgtgtacacattacaccatgacttcctgacccttgggaaagcatttaccactcctccataacttctcattttccaaaggagtgtttatacctttaaaaaattcctgtactatcactttagtgggatcttgggaaaggaaggaaataaacacacgtggtcaatctgctgtctgtaacaacagtctgttatttctctttaatcagattctgaccaaagcatcaaagtgaggataagcctaaaatcaggtcttggagaaaatgctgtgagtattctagatagcacatctatgacttttcaatgcattcccttatttagggcacaacaagcccatttcagtgcagttgaaaagatgaaagggcacatgattctcttaaaaagccatagattctggcctctggcatttgagttggttttttcagtaatatattccgtattgaattggctatgcctctgttttccttgtgactctgaaggtattatgaagatgagtgggaaaacatctaaagtatcaaatacctaccctccaattcactctaatcacaattacttgtattttttaaaaatatatttatgtggctgtgctgggtcttagttgtgacgtgtgggatctttagctgcagcatgcaaactcttagttgtggcatgtgggatccagttcctcgaccagaaattgaacccaggccctctgctttgggagcctggagtcttagccactggatcaccagggaagtccccactgcttgtatttgaggaagaggacatgtttatatttttagagactgcttttagaagtattgtaggcaatttggctttgtttcgtcttagtcgatcatctaggtactagaagcttgttttaatcttagaccccagccttggacctgctttatcagaatctgcactttaacaacccccaaggtggtttgtagacacaataaagactgggaagcaacaattcagaccactatttctaaagcttggctcacactggagtcattcaggatgttttttaaaatattaatgcttcagtcccattcccagagattctgacttactgttctgaggtatggcatcaaaacccactccagtattcttccctggagaattccatggacagaggagcctggtgggctacaatccatagggtcacaaagagttggacatcactgaagcgacttagcatgcatgcatctggcatcaagtcatcaaagttccccaggtgattttgattacagcacagcttgagaaccactgaggcagagatgcatttctggacaacaaaaagttttacagaaaatcagattacttacaccttcatgtgaattactttaatcagctattgctttctcctaaacacctgtctcaggttatccagtttgaagcaatttgtttctggggggaaaaaagagaggagagggttgcctcaggcagatggagatcaaaagcatggatggaagtgtggcacccaggaggctttgcaggattagagaacaacctggcattattggataaaacagtccaaggtgctacagaaaattgttcttttcgctggagagagtcaaagatggcatttctacccccatacttttcttgggaagttaactattgtccaaggctccacagtagttgtagtgtaattttcatatataagcaaaacatctaaatataaataacatgtcattgttgttgtttggtcactaagtgatgttcaactatttgccaccctgtggaccatagcctccaagctcctctgtccatgggattctctaggcaagaatactggggtgggttgccattctgttctccaggggatcttcccaacccaggaatcaaacctggtctcctgcattggcaggcagatttattaccactgagcacccaaggaagcccatagtaggagtaaaaagtgaagatttaagaaacaagtataaaatggaggtgtatcatttctcaaactctgaaagttcaagttcctatttcttagcaatcattgtctctggggttatttctccttctgtcctatttttattagctcttccttggactgataaaatttaattttaatttaaagtatccagtagatcaggattcttttcaattatcttcttttttcttgacatgtttttttcccatgttctctttccatgcagtgagggattagtaaatagtcttcagaggggtggatggtgtaatattctgaggcccattcacagagcaacaggctgctttgatgacagtggagttatacttttagccagaataactgtccagttcaagctacttcatagcaaagtccacctggatctttgatactatattgaaaacttagcctttacttttttaatatagaaataataaccagaatattagtcgccatgttcagttcagtcgctcagtcgtgtctgactctgcgaccccgtggactgcagcatgccaggcttccctgtccatcaccaacgcctggagcttgctcaaactcatgtccattgagttggtgatgccatccaaccatctcatcctctgtcatccccttctcctcctgccttcaatctttcctagcatcagggtcttttccaatgagtcagctcttcacatcaggtggccaaagtactggagcttcagcatcagtccttccaatgaatagtcagggctgatctccttcagaatggactggttggatctccttgcagtccaagggactctcaagagtcttctccaacaccacagccatattaaaaatattattattactattaaagcaactttcccaataaatgagtggtatcaagctggactcaatgtagcaatcctttgaaattttttttttatatacagctaaaattttcttttgaaaatgtaacattttcaaattgaagtgtagttgatttaaaatgtgtttgtttcagaggcccagaatctgttcagttatacacatacatatatatttttcagattcttttcccttataggttactacaaaatattgagtatagttctctgtgctatacagtatgtccttgttgtttattttatatatggtagtgtctgtctgttaatcctaaattcttgttttcctcccccctttcccctttggtaatcttaattaggttcgttttctatgtctgtgggtctatttgttttataaataagtttctttgtatcatttttttagattccacatataagcaatatcttatgatatttgtctttgtctggcttgcttgcttcacttagtaccatcagttcagttcagtcgctcagtcatgtccgactctttgcgaccccatgaatcgcagcacgccaggcctccctgtccatcaccagctcccggagtccacccagactcacgtccatcgagtccgtgatgccatccagccatctcatcctcggtcgtccccttctcctcctgctcccaatccctcccagcatcagagtcttttccaatgagtcaactcttctcatgaggtggccaaagtactggagtttcagcttcagcatcattccttccaaagaaatcccagggctgatctccttcagaatggactggttggatctccttgcagtccaagggactctcaagagtcttctccaacaccacagttcaaaagcatcaatttttcggtgctcagccttcttcgcagtccaactctcacatctgtacatgactactggaaaaaccatagccttgactagacggaccttagtcggcaaactaatgtctctccttttgaatatactatctaggttggtcataacttttcttccaaggagtaagcgtcttttaatttcatggctgcaatcaccatctgcagtgattttggaccccccaaaaataaagtctgacactgtttccactgtttccccatctatttcccatgaagtgatgggaccggatgccctgatcttcgttttctgaatgttgagttttaggccaactttttcactctccactttcactttcatcaagaggctttttagttcctcttcactttctgccataagggtggtgtcatctgcatatctgaggttcttgatatttctcccggcaatcttgattccagcttgtgtttcttccagtccagcatttctcatgatgtactctgcatgtaagttaaataagcagggtgacaatataccctaatctcctataattgtttttcctaaaaggtgggatgagaggcaagctttgtgctattcatgatctctactgccatctactggaggaaagggtgaattttttttctctttgaacaggtttttcctggactacacacattttacacaagccattggtttagcactggaaaacaagaattaccttgtctacaaaaagctgttttttcctttgaacttgaagtttctttttcttttacacttacacatctgagaacttgctataaaaatagtaaaaggtcagcatacttgtctacagtatatggatgttttaaccaaaaccaatggcacacataactcccatctataaacctaccctagagtgcttatttcagcttactttaagttaaattcaaaggaccagtgagccctgtggttcttaaagcattggtgctggaccagcagtgttagcaccatgtgggagcttgttgctgctgctgctaagtcgcttcagttgtgtccgactctgtgcaaccccacagatggcagcccactaggctcctctgtccctgggattctccaggcaagaatactggagtgggctgccatttccttctccaatgcatgaaagtgaaaagtgaaagtgaagtcgctcagtcgtgcccaactctttgcgaccccatggactgcagcccattaggctcctccgtccatgggattttccaggcaagagtgctggagtggggtgccactgccttgtccgtgggagcttgttagagatgcagaattccaggtcttctctgaggcctgggcccagaattcagtgatttgacaagccctccaggtgatgccagggcacactcaagttggggatcaccgactttatgcagagctagaatctttggcatattagacagtttaaaattaacacacgtcgggaagtccctggtggtccagtggttagaactctgagttctctctgctgagggtgtgtattcaatccctggactgggaactaagatctcacaagatgcatggcatggccaaaaaaaaaaaaaagcttgtggaatatcaggttttaataaccccatgatctctactgagcagtgtttttgttgtgaatttgcagtatgaatggaatgacaacgaaatgtacttgttccggtcgtctgtggcatatgccatgagaaagtatttttttaaagccagaaatgagaccattccttttgggtgagttgatgtgctgtgctctcaatcagtatttcccttactcttggatcagaaagttttatgcttcagcttttattcacgtgaaattgagaaaaactcctaactactattaaacctcattgatgtcctggaattagggccacctttttttagggatgcttgtgacttatttgacttgtagatggaagagctttgttattattaaatggccctctcctcacctcttccccccctactttctctcctctccctttcttttccccaaatgctctcatgcaccctcagcactgaaaacaaaaggcagaaatctctgctttcattgagcttgtattctaatgtatctgttttgtgtgtgtgtgcgtgtgtgtgttatagacagtcaacaaaatatataaatgaaatatagtagaatttgatggtgataagtgctagggagaatagttcaacagaaaatgggcaagggagtgcttgctggttgtgtgtgtgtgtgtgtgtgtgtgtagggttccattttaactaaaatggtcaaggaagaccttgttagtatttgaacaaatagctgaaacaggagagagagtcagaggtgcagaccatggggaaaaatgttgcagcttgaaaaatagcaagtagaaagatcccgaggaacaagaatccttcacctattgaaggaacagcaaagaggccagtgtggctggagcagagtgagctaatagaagacaggagattcggtcggggcagacagggccatgggggtggaaaggcgagaagaaagtttgtgtgcgcctccaaagccattctaaggccattggctttccttctgcgtgagaaacgctctgaaccacgtgatctgtcttgggtctttgttttgtttttttcagtaaacattcattgttttatttatttttggctgcgctgggtcttcattgctgcccgtgggctttctctagtggtggcaggcaggaggctactcttcgttgttgtgcacaggcttcttcttgcagagcagtctctaggcatgaggcatgtggccttagtagttggggctggctggctctagggcacaggctcaatagttgtgggtcacaggcttggttgctctgtggcatgtggaatcttcctggaccagggatcgaacccctgtcccctgcattggcagacagattcttatccaccgtaccaccagggaagtacctgccttgcattttattaggatcagtctcatcagctgtgagagcatagtcttgtcacatcctactataaaccccactcctcaccctcacctgtggaggcaacatgacgagttttgccaggaggggcccagttggaagatatcagggcaccgcctctgtccatggaagggagccatcgctgcccgccatgttatcacaatcctgggtcaccagtgattccttgctgagtcttccgccgctttgtttgaaatatttctatcactgaaaaaaactgtggttcttatatggtagcagaaccaatcatgccaagacttgctctcataccttagggaattgagttcatgtgctttgggcagtgtcaaggttattgggacagtgacatccttccgtgacaggccctgctccagggctctccactctaccctgtgactgtgccccgatctccagcagtagaagtcttcattctcttcacagtgtcctctgtgccaccaggaaaaatgtttcttttgtttctccacagggaagagaacgtgtgggtgagtgacaagaaaccaagaatctccttcaagttctttgtcacgtcacccaacaatgtgtctgacatcattcctagaactgaagttgaaaatgccatcaggtgatattttactttcaaatgtaggatagaagggtgagggggtcccaatgcaacaacagtaacgaaatgatttgtgtgttcctaaaggtgccaggcactgttctgagtcatttgcgtgtttttcctcatctgaaaaacttgggttttaattccaaaaggatcgcatagcaaggggattgccttcattgggtttcttcagatgcaggtccttagacaaggatttgaaagtaagtagtttatttgggaagtcacctcaggaagaatggattgagtgtggactggagacagaatggaaggaaggtaacctgacatgttatgagcaagttaccactgtgggcagctagaactccattgtgctgggaattctgggagatggtgtggaacatgcaccagaattgtcccatcagagctggggtatttattcaccacttcccattagtcactggttgagaactgtgtacaggggacagtagttccccagccttactggtctgcagatagggctgaatcttgtagcctgagaatgctctcaggcaaaggcagtaggtcctggctgaaggaagtctaaccagcacgcccggaaaatggtaaatgcagagggtacatgggcaggtgtcgccatcattgctgtagggactttgatgcagaattcatttaaccaaagtctgaaacaaggcaggcagggacagggttccttagatactaaataagtaagtgttagtcgctcagtcgtatccgactctttgcgaccccgtggattgtagcccaccaggctggatagatgttgatgtttccccttgtcattaaaaaaagagaaaaaaaggcttaatataccattgctatgggaaatgctactaggtggcgctcttgagctgcttgtcgtctttagaagcagaaccaagacttgccgggcagagttggcctagaaaatctggcttagtggggtttacaacccaagcacacccagactcagtggctgcctccacaagacttgtcttgggggaaagtgctagctgagatcatcacgaaggagcccagcattcctgcaagctctggggagtcctcaaacttcctatttccagagtgacgagactctttcaggtggaggttgctgcttggatggcgctctctctctctggctggactctgacttcctgacctgcactgtattcaacggcaggagaatgggatgccagacactttggttttcaatctggaatactgaacatttcactgttttttgttgtaaaaataaccttcatccttttttcctctatgaaattcggccatatcccagcacagtgctggagaatttggcaaaggctccttccctgtgttcctccccagagctgtcacttattaggatgtcaacaccttttatttggaaaatggcagctgttgagatttgtgtatagggcctgattcatttgtagaagaggtggatccgattgtccttttccattatttgatataaagtcattgtagacatacctcaacagaaaggaaattcttaccaaacgtgcaacttcgcctttacaacacagtagtcacaaatgaacaaatgccagccatctgcacatttccacacttgcaacctaattttccagtgaagctgtttccaaacctaatctagatcacacggtatgaaagaggtataattgttaaaactcaaatctgtcagtgaacctggttattgactttgatttcattgcttctttgggtaagccttatcaaatccttttggagacagtgatataggcagtaaatcactgcactgttttcttttgcctgagtgttttgcttttgggaataggttgtcccgggaccgtatcaatgatgccttccagctggatgacaacagcctggagtttctggggattcagccgacgctgggacccccttatgagccacctgtcaccatatggctgattatctttggggtcgtgatgggagtggtagtgattggtattgttgggctcatcttcactgggatccgagatcaaaggaagtaagtgacctttcttggacttatttatcctaaaacagaacagtttcatgaaaactaactggaaaatttgcagtaagtggtaggttgtacaagccaattacatatgtggacaattccacagctaaatattcttgtgcacccgctagaagtttaccagatttcatcagcacgtcaccaccctagcaggccccaccatacaggagatctccagcctggggtttactactggtatgccccggtaaactccatcctggccacagcatcatttccctactgctaaaaggcactccaagttctgcagtggtgagtgggctcggggcggtgggcgggggggattatccttactgaggagtcctccttggtctagaagtgatcctagagaatgcattagtgacagatttgaactgtgaaatcgttcaagaatgagctctgaggtttgctccaaactgctatgcttgaatcctctgcatccctcctcctatggcctggacgccttactataccctcagttcatgggtcatgcaccctctaaattgttctcgagttgaagatccaagttcactgtggatttaaatcaccagaggcctgatgtatagttgtgccctgccactagatttgttttctgatcttgagacagcatttacttttgttgggctggtgtaattgaggttaattatattttataacatctaacaaaactctttgcacaccttaggttgtttaaatgtgttctttaatttttatatgcactagtctgttttgctcagtcttcttcactatattgtttccacaaataacttcatttttaaaattaggcattgacaaaaatatattcatatagtaaaaatgttttaaatacaaaaggatgcatagagtttccctgtcactctttgcttccaagttcccttcctaaagttgacaaaaatggtcagttaaaaaaaaatttttttttaaattgtatagttgatggacaatgttgtgttagtttcaggtatacagcaaagtaattcagttatacatgtacacacatctattctttttccgactcttttcccatagagattattagagagtacagagttccctgtgctatacactgggcccttgctggttatctattttatatatagtagtgtgtatctgttaatccccaagtccttatttatccctcccctccctttcccctttggcaaccataagtctgtgactctttctgaaaaatgatcagttttttagagacccagtgtatcagaatctacattttagtaaggccctcaggtgactcatacgcacattacagtccgagaagtgctcttcttcatagtacaggtttgcatgtgagatgctattccaaagttcattcatcaaagaaattctttttgggctcctccttcatgctatacactgcattaatagaagctacacacaaaaataagactgctaatgtatttcttacattaatgtattcagtaattgtataatatattcctatgtaattatgttcatgtatatataagacagagattcagagaggccaagaaaccctctcaagtttgcacagctagtcagtaacgcatgaagatatgcactcggtttctaaagctggttgttgtagtacaaagcgggcctatcctgaccttcatactttggaaagtggtaatttagtagggaagttttttataatgaagtgattggctaaatgaccactgagttcctaaaaataataataatggttaatatttattggagattatatgccagatcctgtgagtactctgccagcattatttcactgagtttacatatctgccatcattttctgaatagttagactgaggcacagaggcccccactctcagacttcagagcttataccctaaccagtctcctactctgccaaccatcgtgccaactgatcatcaggctaaagaagtgaattcaatgcactctgggtgcccacagtccattaaaaggggactggtatgcaaatgagtacaggtggtaagatgctgagatggaaaagatacccgggccattggagtccaagggaggccgtgtcactctaagatcatgatattaaggtgagttcactttatttaacaggaaaaatcaagcaagcagcgaagaaaatccttatggctctgtggacttgaataaaggagaaaataattcaggattccaaaatactgatgatgttcagacttcgctttagaaaaatcttttttatttcctcttgagatgattttattgtatgtaaatattactttcacagtacagaacataggcaattataagaatgtcattaactgtcaaagctctggctctgttcaggaaaagctgtccaaagaaggcatgcctgagaagagggcatcttcccttgcatcacttttagtacttgtttctgcctcagcacttgacttctgtttccttaaagagatgtttctgtttgagaatagagacagtctgtctttggcctcacaggctgttcaggggtaatggaaatggaaatttccattgtgttgctggagatggaaaaaaaggatacagggtaggagcaagtgtgtggaatctggacggatggctcttaaggacgtgcctgtgattggatggagctgcgaggtggagcccggcatgcattgttcacttgggtttacttcaagtgtaaaggaggacatgctctcttcacgttaacttaatctaagtactctagtgattctccccagtcatgattggaccagaacatgccttcttcagagtgacagggctacagaagagagaagaatccagacagccattggaggacattgcctttttactttcaagctgcttggccaccgtctttctgacatcaccctagccctaggggccgccatgaaccccctcccaagctgccatgttaggaacttgctcccgttgctctctaactgtgaagtgcatggggaccccaactgaatgtcgcttctgaagtgggctcccaatctcttgaatcttctgtatttacccataatgtttgagtagtgctgagcacaaagctcacaaagacaataaatacttgatttacacactcttgtggtctcgtgtgtacttctgtgctcggccttccgtggattctctctgcttttcacttccagggacaaagctgcctgggtgtcccgacctcccacatgtcttgaagtgcatcccagtatgttcagttactttattgtataaagtgattatgttcaataaaatcagttgaaaagagttgtgttaagagcatctacactcttaggttaggagccaaacctggcaatggttttacaaatctcagagctcctagcccaattctgagcacagaatccaatacagacctgaaaactggtataaaatggattatgtagattaaaatatccaaactctacctatcagttcactttatgtggtgaccagcatactgtagagtaacttagtcaagtaagaactagcagcttgtgctcaaaagactggaacttcctgctcgcttttaggaaaagggctgttaaaggcaacattagagctgagggttgtagggtgcctgatcagcttgtggacattcttctgatcggctgatggtgaggtagcttgggtggtatttcaagagtcagcatcatcaaccttctggttgtaaccagtctggggtctatgtgctggtggtcaggatgcagttaaattcttccacctggtagggattttagtatctgccaaacagctcaaggacatagctcaggatattatctgtaacccctgaggaggaactaaagttcctttactttgctttatgactaaactatgattattttgtcttgattgactgtttttctttgtttctgcattttctcttttatcttatgaaatttgccctttagaatgcagggaaggtctaggaagctaaagattttctacaaacaagaggcagggtgatgggaaaaggggggagtatctttccccaggaaggtcacacagagtcctgctcagtttcatctttagaagatcaagtatataaaaataaggagaagaaagaaaaatacccttcggcaggggagaccaggaagacctagtttgggcatgagaaatctttctcatgggggcattaagtctgtggtgcaagtctctggtgaatggaatcagagctgcaaagactggcacccactcctgacaatgggcctgttgagcgggaggggctgtattatttcttccttttctcttggggaggaaggaacctggcacacagtacctgctaaataaatgctcactgaacatataaatgccctagtggctgtttcaaaagttccatgagatttgtgtgcctctgttaagagggaaaaaaaaaaggaacaaataaccaagaacaatcattcacaatagctgagggggagtggaatgaggaagggtgtgaacatctctaaagggagattgttctgtctagaaaacagtagcgtcttttcactgtaacagagcccttcacataacctttctctctcccttcttgacattacagacatgacaatgatggactcccaaatgatgaaaacctaagggttcagcagcaggccgtgaaggtggacattcccaggaacagtttgaaagctacagtaccttttagtaatagtcctgagaagctcaaataggactcctgtacttctgtgtcaagatagaagacggaaagagaaagttcagttatcaaactagccagaagtcctcgggctccagacttgaggattttaaatggttacagtaggcctctcttatccccagtttcacttttggtggtttcaggtacccgtggtcaacaactatatgaaaatatttagtagaaaatttcagaaataaacaattcatgagttttaaagtggtgacatctcgtgacgccaactctgctcccccaggatgcgaattgtccctttgtctggtgtgtcccgcccattagtcgcttagcggccgcagttatcagatctgctgtcccagtctcacagtgcagtgttcaggggacacttgttttccttaatcctggccacgaagtgccagaggagtgatgctggtgatttggaaatgccagagagaagccctaaagttttagttgcctttaagcgaaagggtgaaagctctcaatatggaaagaaaaaaatga

SEQ ID NO: 149 - DNA, 237253 bp, Hippotragus leucophaeus
  source 1..237253: mol_type = genomic DNA
ccaggaaattcatagaacaaaattttgcagataaattgttgtttctgaatttaattctaagaagtacactaccccatttttcatagaccaagctgagaggccatgtatactatttctaggctaatttttgcttactgcggaaaggaagatgatttcctgtgaactttaagtatccagttcatgtccatcattgttgaaaaagggaagggagccaagagggccagaagaagtagcaggacagagaaaatgccacatggatttaggaggtgagataactgacagtaaaatgtatgttctttggttagcaaagcgaaaagggggaaagtactgcattcacgacagacacacaccagcattctaaagcaggagacaagaatgtcaagagtgtattcttcccccactgccagatggaagggctattattataaatgaaaggcagcagtagtggatgccaggcacttttgttgtgtgccagattctgaagtccagatgtaagcaggttacccctgggacaggacaggcttcagctctcgcagcagaacagaaccaatcacagttttctcagtgtttatgatgagctgtgctgtagagccttccttcagttccactgtgactagcatcagtgacccactgtgtacagttttagctgcaaacctggaagaaaaaaaaaacaaaacaccagagaccttttatcatgagggggaaaaacagagacagcacatattcaaataggtttaaaataacttttttcctcaataatttatcacaggttccctacagccccaaacccaaagacaagcattctcccaaaaaatcaataaactgcccagcacacgcttaccacaagcaggtgatttcagtatcttgggaacagaacagaaaaaggagttctattttacttattagtttgaacaatagatgcatgtgaataactcttgattactacatatttgagaatcatttattcatttgatatataacatttcaccagccatagggccatttaaaatcaactgctctattttcatctttaaaacatgttaagaaaaggtttacctttctcaagtgaaagtgaagttgcttagtcgtcaccgactctttgtgaccccatggactgtagcctaccacgctcctccatccataggattttccaggcaagagtactggagtgggttgccatttccttctccaggggatcttcccgacccagggactgaacccaggtctcccacattgtaggcagatgctttaccatctgagccaccagggaagtctatctttctcaaagagctcgaaagttttatttctcatatctgaaaatgattatgcaagaaattagataattttatgaattcatacatgttaaaacattcaacttcagtctctaatgctgaggacatggaagaaaatcacgtgacagccaagtgtaacaccacactccctctgtttatattttttttaaatgttctgaacattagatcttctttctgctttagaataggaaagaggaaacttgaggtctaaggctcacattactaaattccaagacacgaagaacctactaattacacggagttaaaagcagaactagccttttaagcactgcaattgactgcagagccgctggagacgcagtgaacctctctgtcaatcctgctcattcattctgcctgcacagttgagccccagacacgggaagaggccaggcccctcccaggcccccgttttccacatggagagtgttccacagtttttgagggggctgaggggggtttgactgcagggatgactggagaaaaacaaagttgctgcacatgagcctttgaaaacactaacaagtgtggagcaggtctgtaacctgctgtgaccccactttgcagggccaatcccctttcccctttccgtgggacacgtgtctgaacctgagccatctgcctcaattttcacgacatctccagccacaatggcacccagttagccctgacaacagctcacaatacagaaaatcagaccgcggcgctgccagcacgctgtgggccattcaagagcaagccaactggtcagtgtctcctgtctgacaattagcacgggcctcgcacggagcccacagcctcctcagggatctgtttaattaccatcaacataaaagagggagtttatcaggagacactcagaaaaacttccctcccgacttaattaaaatattagccacttaagcaggaagcagattctctttaaatggaaagtaatttcttttttgaggttttttttttttttaaatgacaccaagagctcataatatattagattcttttttttatctttttttttgggggggcggggggggggaggggagtacctaataagccatttttggcctaaatagaatcatgaagatcagttttccaacaattataaaaatgcatcaaaagcaaaacaaatatgctaattttactaagttgaaaatcttttcaacacttttaagccatgttttaaaatgttagctaaaaaaaaaaaattagctaatgggtggtagatgtatttgtgtagtctctccaaacatgctgaagacttgcaaggaatctgatagagcagtttttccactgagagaagcaactgtaagtaagcagtttaggaacagaaatcatagaggtttcataaaagctttgaacatacacacccatctgttctttagatgcccatacaagagattcagaaacgggcacctcagctgcactttttgtgtgtgtgtatgccattttatttttttaattgaaggataattgctttacagaattttgtggttttctgccagacatcaacaagaatcatcataggtgtacccatgtccctccctcctgaacctccctcccgtgtctctccccatcccacccttctagattgtcacagagcccctgtttgagttccctggtctacaggaaattcccactggctagctatttcacatacggtaatgtaaatttccatgccactctctccatacatctcacccgctccctccttccctgcccccatgtccataggtctgttctctgtttctccattgctgccctgcaaataaattcatcagtaccgtctttctagattccacatgtatgtgttagtatgcaatatttatatttctctttctgactcactccactctctatagcaggccctaggccatctgcacctttgggagaatacaagatcgcccgccctcaaatgacctctcttttctatcaccttttgcaggcttctgcattccttttgtcccaattttcgaggttcttctgcttcacaggagaaccctatttctgtatttctgttaaacccatgtcaccagatgacagattctaggtggctctattgtctcacctgtttatgcaactttccccacagatgtggtcatcaccaaattgtcattcaacaaatacttcggcagaggtccctatttctgacaggttatcattatgtcaatggcagtcttagcagtctctttatttacttaacacttatgccttgggaccatgaagaagactgtgtcacacattgtgaataggaaggcaaaaagtgctgctatttgactgtcagggctgcacagccccaaagcaccttttatctcttttctattaaaacttaggtttgatgttacaaaaatacaaactcagcagagacaactgtcaactctgatgtcagtctgtttacagagattaaaactactgtcctgttgtccggttccgaagtcctgctcaactctctgtgaccccatgtctacagtcttgtaagtctttttaaaatatttattaccgcaaaattatcaatattgtaaaggatacaaatgtagaagaaaagaggtatttgcttacactgcagtggaaacacgttaagcaaatcatcctagcaaatctgtcagctggtgtgacagctactgtcttttaactagttctctgtgttctaatgggcacaaatggtagaaacaatgttttaaagcagaggaccagaagatcagatgttctgacattctcatttcacagttcaaaaaggatgaatttaattgaaacacagcatgattacaattggtttgttttggaccatggaaagcagaagccacccaacactccccgcccccacccacccaatttcttaatcacttaactcccaaacaggctatgctttaatgtacatttaaaagatagttacggaaagagtactaattagtaaataacaaatagctagcttgggggtgtaagaaacactgaagacagcttgcttcaaatacttgtatactaaatttaatgactgacatcagaacctttgaacttgcctcaaactaagatcacactgtgatacaatgtttttcagaagagctgtgaagtttctgatcatggaaatgatgatagcagcatttattaagtgctgtgtgcagtgggtgctaagtacctcacttacattatttctcttgatcctgagtcacatcaattcacagatgaggaaatctgaggcccgcagaagtggagaaacttgctcaaacacctggctagtgaatggctgagcaggaatttgaacccaagctttctgatttgagatgacacaattctaatatatgcaaaatgccagctgagtatttgttttttatctgtcaacagataaattaaggtttttctgatttaccttttatgcatacaatctattattgttctagaactttaagaagaaagatttttctcttcaaaaattgtgcatctgatttgtagtgttctgtaattcaaagcatcttgatttgatgctctgtcatgacatattttaaatttgtctttaaaggttaaaaaaagaaataaatattctcctagaccctactccttcaaaagagacaccagcaatgaaaaatacaaaaccttgaatggagctgtaatgtaaggaggggcaagtggagaccaaccaacctcgaacaccagtaacaccacaaatgagaacaaataagtgtatgacaggtaaagaagtactgcctatgtatgatgggctccttgttattaaaagaataccatctaggtatttttcattttcattctaaccaccaagcacttgttgtctgtaaccactgagaaggtaaaactgtatggatatatttgtatttcatcttattaaatgtctttttgtttattatctctagcaactgacatttaatttttgaagtctataagaatttctaaggtatggcaaaacccactacaaatattgtaaagtaaattagcctccaattcaaataaataaaaataattcctaagatttaaagaaaaagacaaaataggctggttgccaaacctaaatgaacgtatgtactactcttctaaagaagctaatttgtaactattgagaaaatttataactattatgagaacaggtcaaataacacatttgaacaaatatattttctacaatgcatgaacttattccttcatgcacttaaaccgtactttttttagatttgtgagaaaatggctatggaccttaaatgctctttgttggaatgagaaagaaccctgcaactcagttgtttttaataacttaaatgttaacagaacatgaatttaaaaacagtgatctgagaggctgcatccatccgcagggtattcacaaacataagatttttttatgcagaatcatatttgctacgcttaatgcaacagctctaagacatgcttttccttctcttggatagtcttcctggtttctgatttttctattctgagttcaattttcttgtgttttctgttctactggttaccagaagctgtgacaatggcccagtcaggctaaaacttttttttccctactctgtacatgaagccttcaattactgcctgctgaagcagacagaatcctattagtaagaaagacgatcacaagatgcagtgccctgccctagctgtgtaaaaataattagtccaaagttgacaaatgtgtaatgaagtcacacaataattatatgtaagaaacactggtttgaataagtttcctaacatcaaacaccaaagcatgttgatttgtagtatttattttctaaaggatttaaatgataaatccctataattttgagttaatatagcataacatttttaaaaggcagagagtttgtatgttgtaaaaaatcctattttgttgactataaaaatgtaaaagttaagcccactaaactattgaatccatactgagaaaaaatttacatgtgattcaagtttagagaatttatctgaagcaacgtatttttccttattatttttttaaaaaaggccagcaatattgtaatgtttcctttaacattctgatgagaatagttgaaacaaaagaattaggtgccatcataatttaggactctattttccattctaatctttagaacttgtataaaacacgattccccacgctaccctgtcaatgatgtgttctcttttctttatataagaaagctaaaaatatctaagcgcactttctcaagaaagatacaaaacatcccagttattctagagaatttttggtttgtctgtttgttgggggtggggtgggatgggacttaacagaaaaccagagagtaaaacaaatcaattcttaccccattctgattacttacaaaattgtcagccagaaggaaaaccatcaagaatacctttctttcatttttatatgaaaacatttatatattcctatttgtaaaactgttgcattgtagaaaatgatctcacaaacagtagaattaaataaaatttaaatatagactatcctaaaacaaaaattaactgcagtttggttatttctgaaatatccaaatacgcctttcgtgtaaaaattaactgaggtccccatttgtttttcaatgaaatgctgctcagagccttcagagatcaaagcagtcagataaaaagcagtgctgccccctagtggataaccaccaaactgagaaaaactgatcacaaaataggtttcaccaatcttagtaatgtttgagattccaatttgtttttgcttttttaggggggccatgctgctcagtttgtgggattttacatcccaactagggattaaactgggccctcagcagtgaaagcaccacagggaattccctctgacttgttatagagtaagactgaagcctggcatctttatattattaacaactgtatgtacaaacttttgttttcagacagatgaagtttggtgactatagtaccaggcttataaaattcgggcatcaagacatcaaatgtcattcttttccataaggtccttcaaatttacccggtatttaaatattccatagttatcaggggaaaagaaagaagacaactagcaaagacaaacagtaacttaaagacggaccaacctgagaaccaaaaccaggaaaacagcgaagacctcaccaaaatataaaacgtatctgtgtcgctcatgtctgtaaccccagcactaacaaaatctgtcacaatggtcttcaaaaaatactgaattaaggagttacacaatatggatattttaggatacaaacaatggtacatgccaatacttaagaattaaacatgtatacacagtttaaggactagaaatgaaccaagttgttctttacaactactctaagtaaaaaaaaaattattttaatcctaaaacaataaacggtctttaggtgtgttgataaatttaaaaagtcggctgccaggttgccatggattcacagttccattcacagcatcatatttttctaatagttaaggacctaagtcataacagtaaaacaatacttattttattaggattgtaattattcacaggttgtacatgttcaaaatttgcaaattaaaaaagtgacacagtaaacaaaatccaaaccatagattaagaaatatagggggtaaaaaggaatgttaagtcctgaatacaagttaacaatgaaagctcttctaaggttttactgaataacttaagaactaaaatagaatcatgacagagacatggctttctgctttcactcaaatatcacattttccccttataaggtcaatttgttgttcatgaaagggtaaaatgagtaggttgtacgttataacaaaacaagtatgttgtacgatacttgtttttaacaacattactgtatatgaatgtcagaattcctgaaactgggttaaaatgtccaatgctgagactgctgaaagacaaacttttacttatggtctaagactgtttcacagccaccactgcaatgtgctcctaaatggcaacccaacccagcattcttgcccacagacagagaagcctgtgggctacagtccatggggttgcagggaattgcacatgactgtggccacgcagctaattcctttcttgcgggagcacacaggacagaaggaaggaaagcttaaaccaaacatcttgtctactggcattccttaatgactaacctgcgaaaaagaaacacacaaggaaaaccgttttttaaaaatacaccatgcggctgtcattaaccacggacttctggaacacccgtctgcagctacctggagtactggctccagtgcagattcctgggcctgtcccagtggccctgaatctcaggttttgggtgtgggtcgcaggaatctgagttttacaaaaactcctacctggtttttttatacagaaaaaccttagagattttgaagggacagatttttcggctttctgcattttgatcattataccttagtttatcagaggacaaacaatgtgattaaggcaaatgcacttaaaaaaaatgcagtttttacactgttgaataagaatctcctttaaaacctctgaatttaatttctttcttagaggagaacaagacattttttctggccctagaaaaacctagaatttccaaggctagtgtctctaatctcccctaaaacatattaaataatcctttaacttttcagtctatttgtatagtaacttactgctgttcattctgctttttgtatatattactttatttgttgttgtttagtcgctcagtcatgtctgactctttgcaaccccatggactgtagcctgccaggctcctctgtccataggatttcccaggcaagaagactggagtgggttgtcatttccttctcaagggttatcttcctgacccagggactgaagatgtgtcttttgcattgcactgcattcccacctgggaatcccatattctttattagtattgttttaaataatatgcttttaagactttcagtgtctcatatgacactgtattatgcgtatctaaacaggacatgaagacatttggctgtatatttagtaaatgctttgattcttttgattctgatgtctatattactccttatcatgtggtaacggtaatttggaaaatagcaagattggcacaatgaccataactctgcagatctcagtaagatggttttattctcaaagagcagcttttttgatatgtaagtacctaccatggaaatgaagatagaaattaagtgttttaatagtatactggttgggtttctgattctatggctcatttagaaaatcaaagctaaatgtcatataatctaaaagtagttatactttttcaactgatctttaaaagtggttaactatacttaaaatgctcctggtttttgaagtgaattccataaaacttgtgctcctttaattgacttttccttaatggaggtattttctgctaatgtattagaagccattttctattatgtattcaattaaaatgtctactttatattattacacacttctgcatattaatgaagattcatttttttattagctaattcttatataagtatttttaaacttggtttttaatgtaaaaaatattcaaattgtaaagcatagtaggaacaaatgatcctaaaattagacaacaggaacttaattcattgaatggtcacaaagaatattctaatgttaattcaaaagtcctctcagaaataaaagaccctgaaaaattaaatagaacataataagtaggccagccaagaataatttaatttcttaaaatactgatggtcaaaatgcttttcatgcatattgttttttttcaagtaattttaaacttattaccattaataaatacaagaatggttttggtactatttttcataaactcaaaaaagcaactaccacagaagaaaaaatctcatagagtttcaattttattatgacaattaatatataagcttagatatatatattcattcatcccacagggtaatacactgttgaacactaccattaaaaacattaataaaatttaataaagtagtaaacttaatttttgttattatgaacagtaattgctatttcattttaaatgaaatgaagatagccatcggtacagattttattagtaattgtttattttggttttaacttactgggcataaaagagtggcaaaaatgttacatttgcaggataataatttttgttattttctctattaaagaccacaagtatcaagacctctagatatttattacctggaagccttctaaaatttaaaacattattatagccatacctaactataaaaaaaaagcaaatgtaaaacattttcagtcagtaggatgatacttttgaggcaagtcaagatagcacagcctgttctgaattagatacagccattgcattctcttctggctctctagtcacttggacttccccatcaagctacagagccaaatgccaggctgctgtgataaggcttcattataaaagtgtcaacacactgcagaagtatatgaatatgaggaccatggaccacgacgtctaagtgcaggcttccctggtagctcagcggtaaagaatctgcctgcagtgcaggaggcacgggttcaactcttgatccgggaggatcccacatgctgcagagcaactaagcccgtgcactacaactactgagtccacctgtggcaactcggagccgctgcgtctagagcctgcgctccgcaactagagagcagcccctgcttgccacgactacagaagacccagtacagccaagaataaaagcataacgttattttttaaaaagtgcaagtgcaatttctgcattccaaagttgaatagaaatggttcctattgtgtacctcccctgtactggtatggataactgagaattgactgtaacttaatcatctgaacaggcattaaaccactctaaaccaccaagacaagttacaggcaaattttgtgctttaattgagaattatacaattgtgttaataagagtctctctgtttcccaaaaggaaaatagttttcatgtttgttggctttgagaaggtattttggctattttcttctaagaaacaaaaatatggaacactctcattgctttcagaaaagttaaaaacccatatacgatgcaaaacaaaattagaagttccagcataaagaagggttaccctgcgttgtttcatctattatgaaagaacatattaaagtaagactgaagtattgctggatactagatgagtcatgtaaaatttcataaagcataagctaaaagttacagatgacatacaatactttggtgttttagtaatttcaataattcaaaggatccataagtaaaacacaacttctgctaaagaaaaccactcagggaaatggaaaaaaaaaattcaaagaagaaaacaaaacaagaaagacatagagttaaaaattttcactgaaaagtcttctttttgttcatttttccccctattgaataacactgatggataagttgtatttgcatagctccctggtggctcagtggttaaagcgtctgcctccaatgtgggagacccaggttcaatccctgggtcaggaagatcccctggagaaggaaatggtaattcattccagtattcttgcctggagaatcccatgaacggagaagcctggtaggctacagtccacgaggtcgcaaagagtcggacatgactgagcgacttcactcactcaccaacaagaagaccttctatccattttattattttatcatcaacttatgtgagaatgacagggcttatcataaagaaagggaagcagatcagatctcagacggaaggtacatagatctcttgagcaatttacctagtgacctcccttaaaaaaaaaaataaaggcatagggtaaatttgatttgtgactagtacatgcagctttcaatctgccatgatgagtaggtgaagtcaggcaactctgtaatggcagatccagacttgaactcagctcttctgatgtgaagtcagcattcttccacagataacataatttcatttcaatcaccttcctttccctgccatccatttccaaacagatgaggaacttaaagcccataaggagaagttataaagcccaataatggcagagttgagtctaaaaaacccagataacccacagaaatctttctttggggcctctcttgcccctgtattaatttaaaaagatacattaaatttctaaaggtttgaaggcactctctttgattttaaattatttcctaaatgtaatgatggaagtatgccattggcagtaaaatgacagaggaattaaagatagtttgcaatgaatttccttaagctcacagaggactaagtaatcactgcatgtttatttaaggattaattattttactttcatttcaagtcactagcattcgtaaggcaatggcaccccactccagcactcttgcctggaaaattccatggatggaggagcctggtgggccacagtccatggggtcgctaagagtcggacatgactgagcgacttcactttcacttttcactttcatgcactggagaaggaaatggcaacccactccagtgttcttgcctggagaatcccagggtcgggggagcctcatgggctgccgtctatggggtcgcacagagtcggacacgactgaagcgacttagcagtagcagcagcagtagcagcagcagcagcattcgtaagaacacaaagaaggcacatactaatcacgttttctgctacctttgagggcaaataacttggacctcatggtttacatggctggcagtgaagatacttcctggtgtaagaaacagacgctgcatttgaccccataatggttccttgttactggaagcagcctcaggggattgctgtcaaaaggaaatctatacccaaacttcccctcttttaagtaaaaaaagttcaaatccactgctttataaaacagttcttcctgaaattcaccgactgtagtgaagtaagaaattttcaaccatatctcacacaagtacctttacaaatcactaagctattataaaatgcaggtacactatctgtgtctttcaggaaagtccacatatatgtactaaagactgtacaaaatacggaagagggaccttattccaaacccatcaagcaaatgtattatcataaaaaagaaggcatagatatgttattccctggtggctcagctggtaaaaaacgcacccaccgagacagtagatacaagagacacagctttgatccttgggttgggaggatcccctggagaagaaatggcaactcgcttgagttttcttgcctggaaaactccatggctagaggagcctggtgggctacagtccacgaggtcacggagagtgggacatgaataagcgtgcgtgcacgcacacacacacacaaatgtttaggacttaatattttcaaggaaaattatgaattaaaaattatatatttatacatgtatacaagttacctccacatcacgggtcagtgaacatacctgtgtacattatcttgtccagaagggactacacccacattggctacatttactaccttctgaaggatcacagaggaagcaaaattctgcggggcagcaataattgtggtggaagtttcgttcattccagagagcatgcctgtaaaagcagaaggaggctctcttttactgatttctttatgaaaactacattaaacaattttaaattcatagtcaaaatctaaactttctaaagcagaagaaataccacttcagaatgtgatttacaagataatttatcataaaattaaaataaactgcaactgattaaatttttttaaaaaatactagtggtgttgaaaaatgtataaaaatgcaattgaacatcactcttaataccctgattttaaatactatgataaaaacatagaatcacaaagataaaattttaatttcagtccctttaaaatatactcaattaatttgggctccataaactattaagtttttactatttaagagctctccctcctccttttcattcaaagatctttcttgccaaatgctgcctgagaacaaaccaaagtgtttctggaataactagcagcattatatgatgaatgctctcaatataatggatcaaagttaactcaacagtaactggaagtcactgaacagctgtgtggttctaaaaaatggacaagtatctaagctacactgagcggtaacagtatttgcctagttaatgaaactatggttactgacaaagataatcaaaatttctgaagcaaaaacatctgaaaacaaagggaacaatgtaaattggaaaaatttaaaccccagagacatttcaaataatacttaataaagatcacaaacaaagcaaaatcatgaacaaaaaccatataaaactggttataaaatgctgttaatgtcagaatcttatgtacaaatgttcaaaggacaatttcaataacccgtgaaatacttggaacaaatactgacattaagtacccagttaaaaaaaaaaagctataaatgttaaatgccatctatctgattctgtgatgttaagtcactgacatccaaaagtatctactaaaaatgatgatcctttgagacatctgatatgtgtgcaatagttgacaaaatttataaaaaggtaaaagctgattttgtagcctcaaaaggccctccacctttaatttttgctatttaattttgctatttattgctaatgtaacagaaattaaacaaaaaaatccctatgattagtagtatgaagacactaaagcctaacactgtaaaaagacttatttagctttaacaaagaacagtttttactaaccactttcaaactcggggacactatgttctgtcttagactgtttaactttaatattaggcaaaagctttaaaaaccacacaagcagtcaaacactgcttttaaggaaagcacagcggctgctgacataacactgctgagagatgtgtgtactcatttaggatttaaaccttctccattaagctctattgaagagcaactgctgaataaatgaatgcaactatgtttatgttaaaagcctgtttcccgcagcatgtaattaaaggaaatgttgtacaaagccagtacttttgtcaagctcctgtaaatggaaagatggatagcactcagagaagtgaatgcattgcttcatatttaaccttaacactcttgtcattaatggtttgtctaacttggtctgtaagagacaaggtactgctccattgaagtaaaattaaaaaaatcaactaaaccatgcttttcagaacagaagattcattatcgtcagctaatgtattggcataaagcaaagtaacatcctatcaagtaaggcacacattcaatctgccttcccacccccctttatttttaactcatgctgttttattgttataggcaatttgtaccactcagcatgacagtgtaaactgaatcaagattaatttacatgcaaaagaacacttaggagagcagcatggtaagcaaatgtattgtctcgattgctgaggtggaaaaagaacctggaaagaaaaaaaggtgctctaattaaggggcatcaaatatgattgcttgtggtggttaagggccagaaaatagtaaatgtctgaccatttaaagaattagcatcttgctagctaggaacccataagatggaggcataaatcataataaaattgagtaaccattctaggtttcttaaaccagagattttttcctaaatgaaaatatatcaggtattcttaaattaacgaaaaagaaaaatatgccaagatatcattaaaagtttcttctacaaaaacactctttaaccactatacagcctgctcatacctaatgaaggtcaggtaataggaagaatgttttaaaattctcagactgcagaatatgctgcctcattaaaatttacctcattttggtgaggcagtggacagcacttaggttaatcagctgtaacggactgctgaaatgtaaataaaataagagaagaagatctaaaaaattttctgaatgttttagacttccgatttaattcttaagcagaaagcaaataagaagaggaaatttggaataagcactttccttgggtctcacacaattaaaactgcttcaacaaacgaaattacattttcaaaaataaaacatctcactttatagtactaaaatcatcccacagctagatcatgaactaactttgcaaggaccaaaattcataatgatgaaacaaacacgccttctggttaagactcataatatgaatactctggataacttcaaaatacagactaaaccaatcttttgtttagcactttgaccaccaaccttataaaaacgcacgcctggtcatggaactctaaaggcaacaactgaggaaagcgacagatcctgctacatactagaagcaagacattttcgctttagaaaatattagtctaatatgtacaacctgacagaagtattcttaattagcattatatacatttttcaaatatgcacatctgtagtataaaaatagaatcatattcctcatgtttttagtttataatttcttcagttaaatcctagttaatacagttaatacatttcttgagtcttgaaatttatgccctgtgaaatgagatattaagtgtataaattcattttatttaaagtagaaaaaccagttaaagctagcatgtaatgacacacacagacatttcttaaatttaccggcattgataaaatctgaggaaactgatttttattctgatttagaatttccagttaatgagtcatttctaggtatcttctgcaaaataagctaagctcttcctagagtgatgtaagaaacaaatacatgtgtaaagttgagaattgagacctctattaccaaagcagctgaaatctagaactaaaacgatgctattgaaaagactctttaaacctgtggtacatttgccagcatcaagtcccatatcaaagaatgaattcaggaagacagaaagaatgatacagaaatgccgagagacttgcaaggatttacaaatacttcatataaacaaattttcaaatagctttattcagagtagcctttctgctctattaaacatagcaaacagctgccagatttattcagacaaataatcaacaaccatagaagtaaaatggcagaagaaaaaggaattttggcaacaactccacagaggaccacagctgttctccaagcacacctctctcacgcgattacggttctgtatggctagtcagggaagaaatccctcagtcacaacagagcataaaaaaacttgatcaagtatcaagtatatattctaaaccaaagctgaggaagagaaaaggtatacaataacctactgctttagataaactttagctgcacttttcaaaaaaggactatccccttcacaataaacgtgtcaaggcttactcagctcctgtgtgccactcacctgggtttgctgagcaggtgtaaagcagagaggcaggctttagccagcaaagggtaagaatagcaaatgtaagaatcaattcaatttggcaatggaaaaataaaatcacagatatgactttcttctacagcaaaaaccaacttccaagaaaagtaaatgcaaagatggatttagtcactctttatcacttaaaaataaggcagaagaataaaagattaccattaatttacagtcttatttgagagtttctttgtgagattcttctacaacaggtcttctggacactgaactgcaaaggttcacggtaaaaccaaccaacctctggcactataatgatgcgatgccaggaagcaagcccttctccttaggtataggtatttgtgggcgcctagtacttcatgaaagcttgacaggtatgaattaatgacctcaagatgaagggaatctttgataactccttccaaagaaaaacatagcccggattcatataaacttaaaaaaattgctgactatactatttaaatacatcctggctttataaatgctattcttaattaaacacatagaatgaggcagttgtttccccttatttatatacgaagaaaattatttttaatagaaagtatgcttaactctgggtcaagtccaagatagtaacactttcattctgctgaaaatattttcttttttgttgcttattttaatttgcttcagctctgatacagtcttacagcataacatttctttaatacagaataaggtcaaaagaaaatagagttattttaatattttaatgctacaattaggactttattttgaagaacagggcactctaacagggaaaaatattattagcagaacacaaaaaaacagtcctatagtgaaaggaaatacgtacacataacacgtacggtgatgggactttgctaagtcctaaattcctgacattttcactaatacaaaacacatgaatacatcattagattgataagccaaaattcccaggactgaaaagttaattaagaatcaatttattatttaaaagacatagtaatcaatttttaagtatgccagggatgcagacaaacatatacctttaaggctactttataaacacaaagcattagcaaaacttggaagattgcacactgacatctgttaatagctatgtgcatatggtaatttattttagagctcagccagaggaatgagcacacttatctgggatgccaatttctagtaaatggtaatgatctctcaccttgctccttcttaaaatctttctctgacatggccacaggtaaaagcagttctccaacaggaggctgaatattaacattgaagcaatcatccttggtactaaagaaaaaacacattaaagctgactaaatgcttaacaaatagacattcttcttaacactatgcagttaaacaggtacaattaaagcatataaagatgtttgccttaaatatcacagctaaaaaagcttgaaatatttctcatcactatttgcaaagaaatacatctgttatctcaactggaaagcctattatttgcagttatgataaatatgccatttgacataggacttttaaaaacaggtaaggagcagaaacacctaatgcaacttaccaaatatctatgcaacttatctggtagataagtgaagtgaaggtttccctggtggttcagaggttaaagtgtctgcctggaatgcgggagacccaggttcgatccctgggttgggaagaacctctggagaaggaaatggacaagtgaagtcgctcattcgtgtccgactctttgcgatcccatggactgtagcctaccgggctcctctgtccgtgggattctccaggcaagaatactggagtggattgccatttcattctcaactttgcagtaaaagtgtacaaaatggagtgctttagtcttaaagatatctttttaaagctatcgatttttaaataaagaataaaatggagtgaccataccgtgttaagatgtgtgctaacaaaataataccaagtgttaataagtgtttatgcactataaaaagaaaacctgtacaataatattaatcacagttttattattaatagccccaaatgaaaaacaacccaagtgcccacggataatagaatggataaatgaattgtgatacagtcagtgagatattacctaacaattaaaaaaaacaaacctactgttacataaaagatgattccacagacctaaccttgagtgaaagaagctagaaacaaatatacatattatatgataccaaaactaactcatggatagagaacacagaattgcagtcacttctacagaaaaggtggtatctatggggaagaatgggagacctttctggagggctctagatgttcaaaactttgatttggtggtacacataaaaattcatcaagctgaacactgaagttctgtgttacagatgaagttattcttcaataaaaacaatgtcatatataaagaggagaaaagcaaagagtaaataaaaatatttctatgcaagcaaaaaacccccaaaacccaccaaacacaaggttaagaaaaacagtttcttgaagggtggggtagggataaatattaaaatataaggaaagagaagaaaatccacttcgattttatgctattattatatactataatcttctaagctgccattttctttaatggaacaaggtaaggactagactaacaaaaaaaaaacaaacaaacaatgattctgaattattcacacatggattgcccaaggcaaatcaataaactcaatttatttattaattcaataaacatttactgaatataaacttgatctcatgtactctctgagtgtctggggatttaaagacaagtaaaattggcccttgaagttcacaagtttagtgacagagaaagagttcaattatgtttataacagaaagataagtacaatgttagagatatgtggaaagtatcatagtccaaaaagaggggctgattaattctgcaggagtgagctagaggtacgtttacttccaaaaggagggagagtgacattttacggattctagatctatattttgggaatggtgagcagaaggtgtgtgaaaagactggctggggacactctgcagagaacagcacacacagctgtgggcccagttccccatggcagctgtcctgggaccttgttcagatcacgtcttcctgtcactatctgaagtgtcctgatctgtatgacaaagtatatgattactttactctcataactcaggccagtgtgcttcaaagtatcctgggggaaaaaaaaaggaaactaccagagccttctgacataggaaaataaacaatcaatcacatatgtatgttatagcctgtgccggccctgtatgaaggtggtgtacaagagaaacctaagccagggagatcagaaggagacgaatcaacagtccaagcaggggttttcagcactgactgtgcgtgtggcttcagtgcatcctgacagtgatcctaagaggtaccctctgttacccctagttcaccaagagaagctaaacaatatgcccaaggtcacacaactagtatgaaggtctgaacacagcagcactgaaatgtgaaccgaggtctatcctattccaaagtcagctatataatgtttgctgccatatatatatatattttatatgttttataaaatatatatatatattttacttgactatacaaggctgcttccctgggaggaaatgcggaagacaggggtgttttagagttaaaagggacagatgcagtgatggacgggaggaagagaccttgaaccatttaacgtgaatgactgggaggatgactttcttcaatgaagaggagtttggaggattaaacaaaatgatttggattaaatcatgagtacccctgtgtcactaaggaagagatatttagcagataactagaaatacaaatcatgaatcagaaaacaggtcagggtagtacacatgagtttagaagcaaccagaatgtacagggaaggactgaagccttttaagtaggtaagatcgcataggcaaagaggatatgccaagaaaaaggataaagtggacacctgcatgtaaataaaaacagaagtggtacaacttgcagaagagaattggaaaaagagtggctggggagaaaaggtgtgagtcaaaaactgcagggaggaacaaaaaggatttttagcaatgcagttcaaactggaggaagaatgcaggatgcaatgagctgaagttcagtggaaagactggcagcgaaagacgcgggaccgggagcagcagaggcttcctgaggatgcagaggcaaaagaaaaatgcttaaagcagctccaaagtaattagaggttggtgcaaaacagacagagagaggtgttacccgaggtaaacgagactgggatcaagagcataagaactaggcgaatggatcaggcctggaagggagggagatatttcttccaaaaacagcacagatggagtccttaagatagaagtgttgagagcaggatgctcgaagggtaagagcaggctgaggtactggaaggctaagccacattaagagaaatactcagaggctgatagagtagtaaatggataggtatatatattatgaactaatttagtgttaaatataagctcccagcttcaaataactagataaatcagtgcactccgaagtgggcaaggacatggcactccactgaggcagaaaatccattgaggaaaacaaaactatcaatttatttttttctcatcccacctgaagttctacttttgcttgtacataatacttcagtatatacataatatgtttgcatagtgagacacacacagtacatatcgggagtgtgtggtataaatattttactaagatgtatacaattttaagagttatggccactgggttaaattacacatactatactatctttacttgtgatttcttttaaattatagatgaagtgacttctttccaacactcctgaaaaggacccctagacctcttggttaagcagctgtggggcaccgatgcccagggagaagcgggcaagagcacagaaagaaggggaagtagagctgccttctaaggcatgtatggaaatcaaggtggctaaggagcaggcttcaggctagcgggggtaaaggtgactctgaaatgcccccacaagcaacaaccaatgaattagagatgaatatacatgattcagcttgactggatatgtttcacttctgttactttttgataatgcatattttattttattatatatttattatttatatgttacgttttatttgtatattatatactttattcttatatttatttcattatatattttattcattattctgtgattggtaaaatgattaccatgtattcacatatgaaaaactaaggctgtaagttcatccacaatgggtcttgtggagcaaataatgtaatgaagttggaacacggctgcggcagacacttaactaagtaacacttttctttttcttctttcctgagatcatcctgagtctcttcagggagacaacgtgcccctgcacatcgtctctctcagcctcttgtattaatgacagctggactgatccagtgacccagttatgaccagtgacgcctggacagaaggctgctggggactcctgggaaaggtctgcttttccagcacacacgggctcctccctcccagtcacttcatttctttgttggggggagggggctagaatgcagatggaatcctggaattacagaagccatcttgtgacccctaggatgactggcacttgctaatgaaattagctcatggaagacaaagttgggaagatcttctactggaaggcacgcggagaagccgtggagacagtctagctgctcttaactgctgaccggagagtaataaacaaaaccctgcgtggtgaagtcactatagacaggtttctgttacacacaaataaatgcaaaatctaattaatataactagtacataaaatactttataacccagtcttagcttctaagcaagatttggcttagtagggagtaagaaggaatgtttcctctttattttgggggaaaatttacttttgtttatattagtcatttaggatgtcctccagagtttcctgtgatcctccttttaaatattttgtcttttaaaaaaaaatgactctcttctctctccttatagttcttttcttttgccgtcccaccttttcttctcatctcctttggttgaacatggggctaaacacagatgtcttgacatagataggggaatggtgaaaatgagaaatggcagatgtaaatttaatagaattaacagattaccagattgacaaggtactaatacgaggcagctctaaacagcctagttacaagggatcagatgatgtaatagtttaatgtaagacaagattctacctgttctacaaagaactgtaatgcatatacttagactacatacaatctcatttcacagattcctaggatcaaaattgtgagactcaagtttccttatctatgaagtaagaaaaatggcacttaaccttgtaagctagcttcgacaactaaaggagttatcacaactcagtttagtgcttaatgcatagtagatacccaaaacctacatacctaatagggatgcaatcataatttgtttaagcactcccccaataattctcatttgcaaattttctctaatataaacaaagcttacttaacactcttagatctatttcttcatcacaggttaccatacttccccacgcctgacaccctaaaaatgaaatcactaaattgaagagtttagtttatgaatatttaatacatgataaatactgccaaactaacctaaaaaaaagtggtaccaacttgaaatcccacaaacagtaaataagaatacatatttttctgtaccttccttgtcaggcattaaaattatttaagaattttgcaagtcttcttctatttgaatgaatttttttaaatttccctattaccaatgttgtatatattattgttattggctttctgcatttcattttctgcaaatgaactattttcaaactttctccaccttcatattagattcttttacattgaaatttgcgagagttctttatatattctggtaactaaactttcgtttgctaaaaatgctgtaatactttctcactctctctcacctgttataacatcaatattttcttcttttgtagagaagcttaaaagtttcaatgtcactttttctctgtatctttccggatattgtgtcttgcttgaattttgctcgctcccccccctccacaaagagtataaaattatttgtttatattatttctaaatactttttatagtttctatgattaaataataaatccatctggaatttactttggagtaatctgtgggaagaaggttttttccaaaaaatggtccatatacaattgacatgaaatctcaccctaatatgaaatgtcaccttcatgatatacaaaatctctaaattgttttgtttcactaactcctgtgccaatagccaattacactgaataaaaatattcttgtgaccttaaagaatactttgaagttattattgaaaaagggcttttttcataaattttttgttttgactttacttggacatccttttatccaggtgaattttagaaatttgtcaaggtccttgaaaaggtttactggaatttagctcagaatcacagtgaatttaaagaccaacaagtgggagagtccgatctcccatttaggaacacaggagatttattacttttatttatatcatctttttatggccttcaggaaagtttcaggtttttaaaaaattcccacataggtatcatgtatttcttgttaattgattattccttttgttgttcttataaacagaataattttactcataatgttttaaaattggtcattcctactatatggaaatgctaatgattttcacataatgattcataccattgccctaaactcattgattctaagactttgtgggttggtaattacatgttggatagaaatgataatcttttgtctttccagatttatacctctgactatttttacttgtcttttttattggctagaacttccataaaaatctgaaagtgctgaaaaagagggtaaaactctgtttttctgacttaaaagagaaagcttctgatatttcatgtggtgataggtaacttgtatgtctgataataaacacacacaaatatacattttatttttttattttcaatttttctgtggcaccctcttttacgtggggtttttataaatagtatctgcttaattgtgtttttacaagctcagtatatttccacttggaaatcaacttatggacctgaattctgataactagtatgtgtggcccctttcagtcatcttattttgttttgtatttactatgcttttttcttttcctgctttgttaaactggtcaagttttaagcactccttttcttctttcctttcgtcatttagatgttataagcatcatatttctgttaatttagaggttagctttaacattttaaaccatatttaaacttctttttgccatcagtcaattctcttgtgaagcatgacaagaacaccatcactcctcctcatacttgttcatgttgagatttttttgccttttttgtttgtttgggttttgttttttttttttgagattttttttttgttccagatcattagtttattttttacattaggtatgaacaattatttttacatatcaatggattttacaggtagaattctttctctatttttttattctatttttctctgtcacagattaaatttttttttttttactaactgtatctttgagtaatcctttcaagaaaaggtcgttggggggtaaactgatggaatctttgcttttctcaaacatgtccatttggcttcctcaaaattttcaaggttatgtcctttgcctctggtcaccagaactgatgacgctattgaggagaaatctgattccattcacatttttgttcatttttaggtaagctgcttttcgtctctctgaaagatactaaagtggttttctccttatcaaaaattctacaagaatgtggcctttttgctagttgttcacattcatcctgtttggcctttgatggggcctttcaatctgaaggcttgtacatttcacttgcttgggaaaattttctcctctaatttctgtatttcttttctccattgtctctcttctttccttccagacctattagatgaattgcttcttttaacttttctttcatattttccatccctgtctttttgccttctgttctacttgatttcactcactgagaccctcttatagaatactaaatcagacttcagctgcatccagtctatcatccacctactgaactccttttggaattatgtctttaaatccctaagaataactttaaattgtctaattactctttctcaaagtaagcaataaattcttgctttatagattcctctggaatcagatagtagttataatttttaaagatatcttgtctccttctcagattgtctgctcccttcatgactggttagtctttgttagtcattttgagccttccctttcaaactgatgcctttcttgtaaagtctggtcatcctaagctgtctgtctgtatttataatgaaggactagctttgattaatgaacacagcaagttctgcatgttagctataagattttagataagttttcttcctatgccttagtttatttatctctaaaatgggatactactactactcacttcataggaatgttctgagaattaagtaaattaacacacacaattccaagtgtttagaatagtgtgcagcacgtagcactactccatacatgtgagtgagtggtatttctatggatctcttccaccctgctgggctggctggagttttcttaagtgggtgagacatgactggttacctggtcgtgaagctgggaggcaggtaggcaatggccttatctctctaccaacagatgcaagattggctttatcctagtgtagatgacttgagaatatccttctcttgggtagaactgcatttcatctcatctttgactatcctgcttccttcctataaactcaacccttgctgctctcgtaggcccccacattcttaccaaaagtccttcccaggcaagtagctgctcactttctttacaggggaattcttaggtctgattaaatgtgtattctgcctgctgctaggggaagggttggggaactggggtttggaagtagctctttacttccctaacactgtctcaccctcccttttcttttcacttgttcactttgtgtttgagattctgccagctttgttcttaccattatagtattttctcccataagtgctctgctccgtggtttttattttctctgttattgtatatctgctcccatttgctttctaactgccaataattcttcacaatttctggtcagctaatagcactctttctctttttagtgctcattttctattaaagaatgtattttctgactttttaatgatttggggcaaaaagaggggtggatgttagtgctcagtcctctaacttgagccaagccatataagttttcatactagttaatacattaatatctgctggtaacaagggtgagacctgtttatgcactgcatctacttttagaaagacacatttatgtatattatacacatttaatcaaggacttaatttgatgaccatttaaaatgcaaagccaaagaagagacattaatacttaccaagtatccatataactatgcagttatatataatagctttatctgtctatatgtgcatcatataacaatacagagagttaatctagaagctaaagtaggatcatttcacttttgttccttctctataaataaacagaagagtacctgaagggctcataatccaagttctcagtatttctgaaggcttcctatcaaatatgctcttattacccacaattttatatattgagttggattacatattttgaaggaaaaattcaatatcagccattcttgctttcccctccctttttattgaactaccaacactaatacagcacatcactaagcaaaaagtgctatttactatgcaaaaggcacagtcagtgactggcatctaagaccaattgatctacccattaccattatctccctacctccactagcactactatgaagctattgatttaaacactgtcgatcggtttccattttctgattttgggcaggccaattaagaaagtgagtaattgtgattacattgcttcaggatcaattacatttgatgtaagacaaagtgttcttttggaatacacacaaaaataatttttgatatagtatggttatgtacttaatacaaatctacaataaataactaattcataccttcacaatagaaaaacatattaatgcagatgcttataatagctaaggctattttctgtctaaaacaaattaatcattttcctaaaattagtttaagagaatctgagaaaaaattattcatatatactttccaatggaagatagaaatcaaacattatctaaatacttttccctaaagagacttagttaattgtcaaagacaagatgtaaatcttatctaatgaactaaacagaaaatctttgtagtgaaaaaatatttttaaaagcccttcactgcacaaatgtatggcaaaaaccactacaatactgtaaagtaattagcctccaattaaaataaataattttttaaaaaaaggtttttaatataaactgaagagaaaaaagaatttttttagttcttaattttgccctaacttagtgcataagctttgtcattgggttcacattgtcgaaatcattaaaatgaatatacctctggtgttggaggcaaatctatttagagtgatgttactcatagtcttgtgctcagtaatattgatctgtgttgtttgtctaatagaaaaataataaacaattactaggcaatgttgggaaaagtaatcagtttttatatatcactaatatagcagacctcccaaaacataaaggtgataatctgcataaaatcaatgtgttatgctacattgcttatattcatcattgcaggttctcagcaataaatggtataatattaggcctgacttactagtattgaaaaggtatatgaaaaagaaagattcattatacttaacctataaacttatttaaaagtgtctgtatatttcctaatctggaggtttttatcataacaaattctgttagaagctacctaaaatttagataaataaaatgtctcaattcttctcagaataagaacaaaggacttcaaatcaaaataacaaattatatcttaaatcagaaaaatataaaagaaatgagttcaaaagataattcttaaagacacacaaatacagctagtttgctaacagtttctggatttcatcagaagtgtataaaacattatataaaacaatcacaatgaaaaatctcaatcctagaaaagctctttaaaatagtattcacctatgaaaactttgccaactgataaatgttctctttcgaatttcatcaaaaagcagtttgtaaattaaagtgaaaagggaaaaatgtattggtttttggtactgacagaatcagtaatcctccactttaggggcttaagataccatataaaatgtttcaaaaggtatcttccctgggctagccaacaatattatgaaatttaatttctcctgagttctcctcatgaattttctcataaattttacaaaaccatagagataagaaaaaaaaaaaagaaaaatatttagcaggctctagcaaactgactgtgtggatcactataaactgtggaaaattcttaaagagatgggaatactagaccacctgatctgcctcttgagaaacctgtattcaggtcaggaagcaacagttagaactggacatggaacaacagactggttccaaataggaaaagaagtacgtcaaggctgtatgctgtcaccctgcttatttaacttatatgtggagtacatcatgagaatcgctgggctggatgaagcacaagctggaatcaagattgccgggagaaatatcaataacctcagatatgcagatgacaccacccttatggcagaaagtgaagaggaactaaaaagcctcctgatgaaagtgaaagaggagagcgaaaaagttggcttaaagttcaacattcagaaaatgaagatcatggcatttggtcccatcacttcatgggcaatagatggggaaatagtgtcagactttatttttttgggctccaaaatcactgcagatggtgactgcagccatgaaattaaaagacgcttctccttggaagaaaagttatgaccaacctagacagcatattcaaaagcagagacactactttgccaactaagatccgtctagtcaaggctatggtttttccagtagtcatgtatggatgtgagagttgaactgtgaagaaagctgagtgctgaagaattgatgcttttgaactgtggtgttggagaagactcttgagggtcccttggactgcaaggagatccaaccagtccattctaaaggagatcagtcctgggtgttcactggaaggaatgatgctgaaactgaaactccagtactttggccacctcatgcaaagagttgactcattggaaaagaccctgatgctgggaaggattgggggcaggaggagaaggggaagacagaggatgagatggttggacggcatcacggactcgatggacacgagtttggataggtgctgggagttgggtgatggacagggaggcctggtgtgctgcttcatggggtcacaaagagttggacacgactgagcgactgaactgaactgaactgatgttgaagctgaaactccaatattttggccacttgatgcaaagagctgactcatttgaaaagaccctgatgctgggaaagattgaaggcaggaggagtaggggacaacagaggatgagatggttggatggcatcaccaacacaatggacatgggtttgggtggactccgggagttggtgatggacagggaggcctggcgtgctgtggttcatggggtcgcaaagagtcagacacaattgagtgactgcactgaactgaactgaataaactgaagtttaactatgtatggaagaaagaaaagtgttagtcattcagtcgtgtctgactctgcgacgccatggcctgtggcccatcagtggactgcagttcatacagcagactgtaatggctatctgtgtaacaaatactaaaaatacatatatcacatgtaatacgtgcaactatttcagagcagtctaaatactgccaaagaaaaacacgattgtgtaaatattttctctcatagaaaaagcttttgaaagtcttgattttgatctgctattgtttatagtaacaagaaacacagaacaactgaacttaccacaactggaaactggcagtctgagtggaatcacaaaagtcaatacccattgaaacagtaatggatcccgcaggctcaagagattctaggaaataagataatttagacatgaaaacacagaggaagtgaaaaagaggcaaactaaacactgaaaacatatgtaatatttgtggtttggttaaaatagtcaaatataatgataatttgtaagaataatttgaaactaatggtattaaagcaaattataaagtaatttcacctcaaggctttgtttttcacaacttaattctgcacataactacaatgaacatattacatctatttgtttcagaaatagagctcatcctgagaaattccatgttttacaattgtgtcttgataggaactgaaggtgagaaggaaataaatgttttcccgtttcgaacatctgtactagactctgggttttacaagagattatgtacttaaaactatgaaatatttagtctagatatgaaaaatacattttcagcaatgtcctaaattttcacaggggaaaaagtccaaaatttaaagcacgcaaattaaagcaaagttggaagaagaaactgacttgtcctcaggtattactgaagataactggcattatatgaaccaaaatagtaagtctaattgtattatttgaagaattactcaaagaaaatttagtagcagattatgttatcttgaaaaaacgaattataaaatgacattttgtagatgtgtaatttctgaaccttcaactatcaactaatcaagtgtgggaaataactgcttcaatatacagtactggttgataataataaaacttaagataaacaataacacgattttacactgcttatggctccagagtcaaacagtaacactatacattagaataataagggatcttaaacatatacctatttagtataaatatttgtatatattctatatttaaatagaaaccattcgcttttgacttctactttgtttaaagtctccagtataactgtggttgtattgttagctgcattactggatataactatattttagcaatcacacaatggtccaatagactgtgattatcctagggcttgtgataggtataatttcccatttaatgctaatcattacagaaatcatggtacaggtagaacaaaataattcaataagcttaaaatattaagaagtatttttatatctaaaagcctaaatgaagattaagcactgtaagaaggtatttgatgctgacttttaaagtgctattggtgtgctgattctagttggaattccatttatttgtaaacctaacatttaccaggagggtatgtaagtaccccagaagccttgctacttaatctttgacaaacaggctttactgtaaatactacaatgatagttttcttgcatttctcctaaagcctaaaccttatcagttcacagctatcagtcacactgttcagtgctcttcttcactgaatccttgatgctttcttctgtgccacagatatactggggtttggtcttgtttgcacctgacatcacattggtagcaaatgctgtcatctccaaaaaacgatggcactcgggactacatctttctatatcatgtatcctcatatctcatttgaccaagtgacagttcttaggatgccttgatgatgtcactgtctgacacagtttcataacatcctcagtcttaattaactgagagctgagtgccatactgattctggaggctagttcatgatcaatggtatgttttattatataaaagcttcagcagcagaggggcttccctggtggttcagatggtaaagcatgtgcctgcaatgcgggagacccagttagatccctgggtcaggaagatcccctggagaaggaaatggcaacctactccggtactcttacctgcaaaattccatggactgaggagcctggtaggctacagtccatgtggtcaaaaacagtcagacatgactgagcggacatgaattcggacactttaactttcaagagcaaagtgatcagcataaaattattcatataacagatttttataatatttgaagcctactataatacattggaaaagtttattcaggcaggggtctacagttgaatactggttttgaatcatcacaatagacatgagagggttatgcagaaatggctgaaaaacactggttctattataccactatattaataatgaaaaatgaaatcacacaggatgctgtctactatgacggggcagttgtgtagtaactagtgaaatcttagctgaactcaaacttgtcaagtgttaacatagagttgctgaatatagtgcagagagcctaaggctactcttttgggggggtgtgtgtgtgtgtgtgtgttttaaatttcctgtgtacatgtacctgatctttgtgggaaaatggcactttattcctatcactcttgcaaggaatccagtttcatgctaaaggaagggcaaaatcctgacaaaaaagttttctcatattacagagaaaaagagaacagactggtgacaaataagaaagtcactgactccttaacatacatatatgtgcttattaaagaacacaagtatcttcctttatttcacaaaaatatgaaaatgcagtattttgttgcacccttaggatgtttctggaggactaattaagatatatcatactctgagctctactgttatctactgtctgggaagctatactgcatgggaaagagctctgtatcttgagggtatccagtaaatgccaacaaaatgaatgaaaccctacggtcaggaaatctgcctaagaaaagaaagcctattactagtacggaggcaatgatatatattcatattttattttgatatgaaggccatactctgaaatttattatatttatttcttctattctacataggccaacaaaaggtcaactcatcaactcattatgccagctcaaagaaacgttaatactgttctactgttttaacctttggataacattttcaaccttcagacaatgcatatatcagttgcttgatgcttcttaaagtaactttttaactagattaaaaaaaagctggattgcaagcaataaaaaaagaacacaaattgggataatcttaattccttgacaatatgttaaccacaaaataaataagaatcagcacactgtattctttaaatggtgtcttaattaccaaattatttttttttaaggatattaagtgggttctgaaatcaatttactttaactctacttctctctactttggctgctaccaaatttcatctaaatattaggaactttttatatctttgtggaaaaaatataacacaaaggatgattttttaactgaatgtctcattaaaatgacagaggagagaattcaacaatgtcaaagagctcactcaggcaaagatggagaaagacagaataactatatgataggaaataatgagtaaagaaggtacagttacctggtcaaaaggctttgctcacctcaagtatcataaaaaaggaactatgtagacctgattgtaacacttcaaggattcaatgacagaaaccttatatcacttttaattaaggtcttttctgaagcttctttcaactaaactgtaggactgcctccactcacacacaatcaaaatagagctaaacattctaactactgtaccatttaaaaaattcaaagtaagccatacaactgttacacttaatgctaagaaggtgtatctcctatagcagctggggagacagtatgatgtaccgggcccggaggcagcctggaaggcgcatggtacacagcaagggcagcctactcggtgtcagctggttgtgcagcaggtggggataaagcacgggcaccgccatactcttgtgctttatccatgaacagcgagatttctgggttcatcctttagtgtgaaaagatgctgatttttaaatggtggcaacagattaaaacacatgatgtgtgaaaataccagtgggcgtttctgccttcagaaacataatgtgggctttctgccttcagaaagaggaaaacagaattggtatacatcctcttagtctttctccctttacatttcaatctacagaacgtgaaggaaaatggggaagaaaagatgcaggaggtactataaccaaaagggaaagtaaaatcatgcagggaaggaagctgaccaggaaaagaggtgggggtaggtgatgcaggtaggaaaaatgcaaagcaattttgattctccagaaccattctttcatcagtactggttatcaccattgatggcacctgatttgctaaggcaaagaaatatatttatcttatacgataaatttggtttaaaaaggaaaaactaatgttgggttggccaaaaagttcgttcaggttctaccatgccatggtaatgaaaaacccaaatgaactttttggccaacccaatataaaccgagtttggtaaaaatcaataaaataatatgtattctactttatttaaaaaaaaaacatttatcaaatatagttaaagcaataaatgagaattaatatttacctattggattaaaaacatgcatttgcatgcctataggaagcttttttccccctacgtggatattttctatcttctgatcagtggtattattcagtgttatttgcacagagaccatcttatcaccaaaaatgcaaggctgtcttggaaagaagtaatgggcagcaagtcctttcccactcattcgatgaagcagcacatgagttttccctggtacaaagacaggagtactgacctattgcacattggaaaaagaaaaaaaaaagtgaattagtgaatataattactaattcttagaaaatatgtaaaaattcataacatttaactcctattttccctaaagtattaaataaatcacaataagatacaatagtagggtactgcatagatagatatgaagtcagaaattataaaaattcttctgtactctccaggaatatattaaaatattttgataatctacatctaaaaaagaagagaataattgcagttatataaatatatatatctttcagagtttataaactttattttcttcctaggtatattttggacattttgccaattttctttttatttttaataatttgtcttttgacttccttgggctttcaaactataagatataaggcagaacttatatctgcctataagttcattataggcagattataatatgtttcattatagtagatacttacactttcatttccaatcttgagtcctttaacttttttcatcttgaatttctttcactgtaaactaaggactataacttcctttttaagtggttcttcctttgctttaatgattcaaagatttcccctgcctcaagatcaggttaactattcatttacatttttttccagagctcttatggttccaatttttcaatttatgaggaactaatttaggtagagagtcccttggactgcaaggagatccaaccagtccattctagagcagatcagtcctgggtgttctttggaaggactgatgctaaagctgaaactccaatactttggccacctcatacgaacagttgactcactggaaaagactctgatgctgggagggattgggggcaggaggagaaggggacgacagaggatgagatggctggatggcatcaccgactcgatggacatgagtttggatgaacatggagttggtgatggacagggatgcctggcgtgctgtgattcatggggtcacaaagagtcagacatgactgagcgactgaactgaacttaactgaatttaggtatatttactctatatttaatcattttcctccaaatacttaacatctgtacatgattcaatgattagcttttcctcaattatctgtaaatgcaaacattctaattatttagttggagacatttttgaactttgatagaactgctaaatcagtaccacactgtttcatttcttaaagccccacaatatgattcagttgtttgacaaaacaaaatgtccttattcctccacccaccccgcccccctgccaatattttcttggctaatcacctgtttttgtttccactgaactttagactctgagctaaattcaattgtgactggaatcaatggcagcatatgaagtaaaaataaccccatctattctaaaatcataaggtggctgtctttcctttcaaagtactgcatgtgacttgacataggaaggctttaaaaacaaacaatttgtaattaaacaggcccagtcaagatctgttcctaacaagtgtactctctcaaactagatttcctattataatttaacctgttcaacaggttcaccatgccactgacatctgatatataaaaagcttagtaataatactaatcatttaaaatgaaccaacaaaaatctaagagttaaatagaaaagcagaagagaagcaggaatctggagctataagcagccaagaattagcactcttcatataaggttctttgaaggcaggccttatgtcatttaagagctatcaacttgtctgagttggtttattgaattctctcagtctagttctaggacacatggtccactttgtctcaaaattctgcacctttattacgatagttaaaatgatgctaaagcagtgtgcagcaatggaataaaaacagtgtaattgtcttcactcattctttccacactcagccaaattcaagaagcactctttaatgaagttagcatctaaaaaggtcctctgtaacaatcctccaagcttatctatgataatgcaaaaagcctacgttttctttcacagtaaatagctcctaaatggcatttagagggtaataatacagctttttttttttaactatagagatggactaaatgagaatgactattttttctaacctattttctaagttcatacaagtcacatttagtgaatctcctctaatatcttaactacacagatgatattttgttcaagaaaaccagtaggttccataaatcctttgccaatttccacatgtagtacaattaatcctgacaagaaaacaaggctttagttcaacgttttgtatatcagactagttaccgacactccagaagcacacatatggtctgcaggtgcttacattccaagatggcttttctgactttacaattgataaataatgattattttcctaaatgttaaaacaacagtaaaaggtcaattaattagagaatgacctaggctgcggctgtgaaaatgaggatttaagtttaaggatacttgaaaaatctgaaccaaacagaccatctttggctcacaagccaaatatgacctgctgccggtctcgttaagttttattggaacatagacatttgcattctttgacatactgtggatggttgctcttctgctctacggtggaagagctgagtacttccaacgcctaacagatttaccatctggacccattatagaaaaagttggctgacccctgacctaagggcacaatgtcacatccttctttctccagttgttgaggaatagttctccatattctctcacagttctgcgcagcttctaaggaaaggcattaacaaacagctttgctcctgaaaatcttttctaggacgtatagcaaacagtctttggaaacggttcagtgcctcccctccggcgcaaaggttgaacagatttaccaaaagacccttataaaaggttgggatcttttatgctaaaaatcttcttctctaaagcaacacaccgcatgtgcagtcatatctagcattcattgtgtcaccctgtgaaaactggggaagtggcaagaacgatgttcctctggctactgctactgagtaataaattgtcctctgcctttgacacaggagtctgcgtcttctatcagtagccatgaaattgtctcaggctaatttgttaacctgcaagtgaggcaacatctcatacccttcacagttctttgatatctattcatttctttattttttggtcactcaacaattcccagatccacttactctaaacagctaaattaacactgagtaggactatcatgtacagctgtaactgcccgagactggaatatgagctaaacacctagcttacatttaagggcacctttacagagtgttcacaatggtaccgcctgggctagcgcacttcgctaccgagaagcctactttacatagtagaagctacttttttcttttcactttcctttgtaaaagttgattttataacctggataattatttctatgggtttctgatgtcttataatgtcttctgatggctgacaacgaagtatcaaggaagttttatgacagacactgaggaatcagaattcagtgtttcaggattgcttttatctggttgaagactaaaggctagtctttcaaaggtgctttctccccagtgctccacctatagaggtcatgtctgggactgcctaacacatccgaccatcttctaagaatgttgccattcagttcctaatgcagctggcatgttctcatgacaacccatgatctgaccacattaaggaatggctcaggaatggacgcctggcccaatgagtaccttttctaggatttttggatttggcacttgggaagtagagtcaatctctctcaagtggctaaaagtctgagatttaaaactctaatgtctgtggccacatttcctgccatattgctcagcaagaaataaaacaaagcacagatgagacagagagcccggctggtatctttggtttggatggttcttaaagctgacatattcctaccatttctgaagtgtggctttctgtaaaatactctaggaagtggaaccctctgctccttttccttggtttaaaccagttcaaattcagtttctgtcatttaaccctcccaactcaactactaatcaggattagtcagatttgaggatgctaactgggggactggggaataaaattataatgggagaatgtactttctcattctttcccctaaagccctggtagagatgttatggcgaaactcatgcatggaatctgattaggttcaagcatatgaatctaccaattctgtagatcaaagagttgaattagagcaaaagaaataaaagcaaaaacaaacaaatgggactacgttaaacttaacagttttgcacagcaaaggaactgctgacaaaatgaaaagatgatctactggacgggagaaaatatttgtgaatgatatgaccgataaggagttaatacccccaatacataaacagctcatacaattcaacatcaaaaaaacaaaccacccaattaaaaaatgggcagaagatctgaataaacatttcttcaaagacaacacacagatgtccagctggcacatgaaaagatactcaacatctttaattataagagaaatgctaattaaaaccacaataagatatcacttcacagctatcaaaatacacaccatgtcttctctatccattcagctactgatggacattttggctgcttccagaccttgactattttaagtatgttgctatgaacactgaagtgcatgcagtttttcaaattagtgttttctttttgggggatgtgtacccaggagtggaatgtaatatggcagttctatttttcgcttttgagaaacctccatgttattttgcaccaatttacactcctaccaataatgtaggtgggttcccctttctccacatcctcaccaacaattgttgtgttccaccaatgtaaattggtggaaaataatatggaagtttctcaaaaaactaaaaatagaactaccatctgacattccactcctagatacgtatccaaataaaaaaaaaaaaaaaaaaactaatttgaaaaactacatgcactttatgttcttaacaacatatttacaatagccaagatctggaagcaaccaaaatgtctatcagtaggtgaatggatagagaagatgtggtgtgaatatacaaatacacacacatatagatacagtggaataccactcagtcataaaaaagaataaaaattttgccatctgcaacaacatggatggacttggagggttttatgctaagtgaaataagtcaaacaaaaaaagacaaatactgtatgtagaatctaaaaaagaaaacatactagtgaatataacaacaagaaagtagactcacaggtttaagaacagactactggtaaccgatgatgagaggaaagggaaaggggaaagacgggagtaggaggttaagaggcacaaactaatatatataaattaaataagctccaagcatatatcatacaacacagggaataccgccaacattttataactactataaatggagcataacctttaaaaactgacttactatattgttcacctgaaacgtaaataattttgtacatcaactatacctcaaaaaataaagagaaaaaaaaaaaaaagagtggaattagcaattcttatggttcaatctaaaagcctgctttggaattcttgatatgcccatactactcactgaagctctatgttgaggctacagagcaaaagcccggctaataaaggactggtttgcctgtctttgttctcttactctatgtctcccttgggtatcttggggagaatggtaagcgaccacaacctcacatctggattactcctaaagccttctagttggtctccttgctcctattcttgcatccgacagagcacatactgaaaacagaggccagtaagaatcagttaaaataaacttacatcatatcacctctctgttcaaaacccttcagtggctcccaatttcattgaaaatgagacctaaaaacccttataaaggccgataaggccccatatggcctggtcccattgtatttctttgacctcatttcctgttacttttgaacccacaactcccttcactccagccaccctgaacacccttcctgctccttgcacacaccagtaagcctcccacccagggccttggcactggatactccctcctggaatgcactatctccaaatactcacatggctcagtgccgatatacctttgctcaaatgtttccttcataatgaggtttagcccatctgcatctcttctttctgattcccctttcttctttttccataatcacttaaaataccttctcagatacaatacacataatcacataatttgcttatttgctatgtttattatctgtctctccatttattccttgattttatgttcaatttataaaacacaattgtacccatttttagaactcaaagtataatttttccactttagtctacaaagatctacagataatatactactagtattggtcataactatacttaacagatgctgagtgctcaacactgttcctaaaaatattacagtctttccaggagcttactgtgttaagtgaagattatcaatattaatatttgtcggttttaggatatgacttgaccaagaatttcctagtacacatatgattatgcacaaatgaaaaataccatatttcttaaggtacacacaaagaacaatttaataattagaaggatttctataatacaaacactaattcttaaaagtatccagttcaggtaaaagcattattttccattaaatattgaaacttgtataaagaggatactatgaaagacagtatttttaaagttttgatttaattacttaattgccagtgttccagaattaaaaatttagctgtattataagcaaatgatttgggttatcctcactatgatttctgagaaggtaattagctcagtaactgtaataactctaaaatataaagctcccttctagagctaacagaacaaaaggcatcaagtaacagtgagataatcctcacaaatctttacacagcgtatgtttaaataataaaagtcatttgtgtacctttagatggtttatgaaaataaccaatcaattctgcagacacaacgttatttctaaaggaaatctatgtgactcatgatgcctgtagatacacagagacaaaccacacatattttatcagtttattacagtaagcaaataagcgtggaatgagagtgcacataactgtctacttagcgcttactgaaacatttataagagctgttatcttcctaataacagacagacagcgtgcaattttagagaggagaaaagcttcatattttttaacacttcactaaaaagtaactgaagagtgtaaaatgaaaaatactctgtgcagttagctggtaatggaccatattatcaactcaagttagatttataggatacaaactagtcactaatagttactttatgacatagcgtgtctgctttttttttgagattattaagattaaagttgtaaaacttctttcaaaatgattgaattataaaatttaaatgagaattgaaaataaaacagggagttatcaagtaagtgcctaagaataaaccttgttcaacatctgcgttactatttcagagatgacacttccacataaagctttatgaaaacaatgtcttctagtcttttgcttcaaaccacattcagacacttaatcatttttaaatattatcaatctactctgtttttggacttcaaaaatataaaggtctatagtacataaaatactttctttgtatctaattttgtttggtttattttacggtagtatatatttagatatatgatttataaaaaatgaccagaaaacagttgtaaataaagatgcagtttcatctttaaaattagcactttttaaaccagtgtaaatctcaactggtaagaaccgtaatgcagaaagctagagtattgatttgcccagtaaactgtagaaagtgagcccactttaatatttagtattgggtccaggtggcacagtggtaaagaatctgcctgccgatgcaagagataagggttcaatccctgggtcagtaagatctcctaaggaaacggcaacctactccatattcttccctggaaaatttcatggacagaggggcttagcaggctatatagttcagggagtcacaaagaccccacacgactgagaatacacacacactcacacacctagttgttatttagttgctgagttgggtttgacccttttgcgaccccgtggactgaagcctgccaggcttctctgtccatgggattttccaggtaagaatactggagtgggttctcctttccttctccaagggatcttcctgaaccagggatcaaaatggtgtcttcttcactgacaggtgaattctttatcatgagccaccaaggaagccccttagcacctagtacaggatttaaaaaagcaaacggcagtatacctatggctgattcatgttaacgtctggcagaaaccaacaaaattctgtaaagccatcatccttcagctaaaaaaagaaagcaaagggcaaatttgtttaactgttagctagaactatatacataagactcaaataaatatatatttttccatcaaatatgactttaaataaatggtttataattttaaagataacttcttccttgtatatgtaaattaaggtattctagaaagtatcaatgattgcactaattactcttattttagtcatcagtatattcatctcttattttgctaataaataaaagtgtatttgcagaaagagctgagtacattatcaacaaacatttagtgagaaccttacttcatgcatggtgttaagcaggctccagcaaacttggcctgtcaatcaaaactaatccacggcttttgtgtagtctgtgagctaagaatggtttttacgtttttaaatgtttgaaaaaataaaaagaaataacattttgtgacactaaaatgataagaaattaaaattcaactggaacactgccacacttcattcatttctaaattgtctctggctgctttgccacagtagcacagttgaacggctgtggtctgcaaagttgaacatatttactctctggccctttacaaaatgttcactgactcccatatagcatgtgttctgtttccacagctggtgagaggaaggtaaaatcagtttataatatcctattctttcctctccccaaaggaaaacttataatcctgtcaatattctactttttaataaatctgaaatccagaatgatgtatatttacttttaaatagttgtatatattatatattccactttcatagaggaatagttccagaactatggacacagatatgttatactattctactattttttttttcatgtttcctttctgacttctggcttaaagtgatgtgaaagtgaagtcgctcagtcatgtccaactctttgtgaccccatggactgtagggtgctaataaaaccaaaataatctggtttccaaagtgtttagcataaaccttccaataatgggctacaataaatttcgtcagaaccagagcattctacacgagaacaaaacaattatgtgtggttatctgacaaatctgagaatcacatgatcttagtagttcacctgctttctgacaatatcaatgacatcatatgaaaaaagaaaatggtagaccctcttcctctggaaccaagctcagaactgaactatggcattgtgtttgacatccttatttccctccaacaactacttgagaagtctgatgtcttttgtattcattttcttcttttctgctgtctaccaccagcttagttcaagtccatcagtgacacttaaaacattaaaaaaattttaaatttgaaattgtaaaagaagtgcagtttattgaaaacaatttcaaacagtatggaaatctttaatcataattaatgatttgctgtacctcccaagtctttgctcgcctcttatttctgcttgctcattcaaactggcctccccgtctcttgactcttccctctgcaacctgtaccacagactgtcgtagactgtacctcccttatacactcagtgaagaagtgggtagaaagtgttgagctttgaagccagacagatgaattgaacctctggctctgcaacttactaagcctatgacactaaaaaagttactcatactctagagacctcaattttcacatgtgtgaaatggggaaactaccatctatctttcagggttgttgtaaatctaggctaagtattggaggagtgaagggcctgaaggtgttaacatgataggcacaagtatgggagtaagacataacttcacagttgaaataagagtatctggctgaaattctgtacaggtcaaaatttggaatggaacagatcaaagagtctgtgaggttacatatgtcacaggttgatagtatacacagtgagatcttcctgggagatgtggggctggagagattatgtgaaagacaccaagatcttcactgaatggaggcaagtgatgaatagatcccaagacgagaataacaagggaaggaagagggtgtaagatgatggaatgggcctcagaagaggaaggaacagaaggatggaaagggaatggccaaatgcaacatctgggagcttcacacaagccatcttgctattaataatgattttgtcaaagaattttctagagaattctgagtgaggtcatgctgagaatatctactataggacagcaagatccaaagggagaccctaagggggaaagccaggctttataatagtactttatcaaagtatgtgaggggagtggtagctgttccacacaaatgaaattaggggccaatggcatctaaaaactggccatgctgcctgcactgaaatgaactgtaacttaggagacagagggacagggatgtcatctagatgaagtcagcgaggatgggaaagaaggatgtcttagctgatgtacaaactggaaaggcacttttattactacccttttcaagcagcaggtctctgtaggtacactttctttgaatctaacaaagaagaaaaggatcctttttacatcagagatgccaatcggacaaactgtaagttgctgaggaattcctgatgtagggcaaatttggggaaacgggttctctgagagcaaagaactaggcagctagctctccctgtcacacacacatactttttcctgatctgtgtacaaatactgggttagccaaaagtctgttcaggttttcctgcaagatgttatagaaaaacccaaacaaactttttgccaagcctatgttttatattctccagtgaggaggtagggatggggagaagaccatgggttacgacacaggaaacctaaaagcctctggagtccacatctgtggcagcaaagcctctggtgagagagactgtgggttacgacacgggacccttagagtctctggagtccatgtctgtggcagcaaagcctctgatgatccacctttactttcagtaaagtcaactgaggatgaatttttctggctgaagaccgaggaccggggcctcagtgcctgtatctgcaccaggccaagtgttctcaggctacccctaatgtttggcatatgaaacctttctctcagaaccaagaaaggctatggttcccttcttgtcaggtagagttactgctggcagtggtaagaaagaaaacactaaattttaggttagaagaacttaaaagttattgacgagaagaaacttattaacttctttgagccagaatttgtaaaataaagggtgctatgtgccctgggctcagtcatgtccgactctgtgtagcccgccaggctcctctgtccatgggattctccaggcaagaatactgcaggggtggccaattcctcctccaggggatcttccccacccagggatcaaacctgcgtcccctgtgtctcctgcactgcaggcggattctttacccattgagccatcagcaaagaaaataaagggtcatactacttaattagtaggactgtttcataaggattcagtgagatactacacatgaaagtgttttggagctgaaagtactcgtctttagttatcattaaaggcaacgtttattagcaaaaggaaaaaaacactggcagaacaaagatcagaatttaccacttttaactgtcatttctgttaagcaataaataatttatgattctttacctttttcaaaaaccagaaagtattgcttgtgataaagagaaataaaggtcagtcctgaaagctagtggggaaacttcttcctcttcttcagagaactacaggaagtgggagcaaccagcatttatgatttctttcaaagactgatgataactgagagaatcttatgatcttaattctgaatcagtatccttagtcagcagaataacttttagaagcaaagcaataaaaggagattagatttttaaattatcagttatataataaactagatacctgaaagtgaatttcaagcgataatttcataagcacacaaaatttatgatgtgatgcacaatctcaggtaagtctgaatgccctaacatcacaggaagactactatgctttgagatatttatacttctttacttcatcagaagtaccgtattgataagatccctaccatctaccttgagtactgaaattatagaattccacttttatgctaattatgaagaattaactctcagtgtctgtacatgttgaaaagagcaatggagagtatcacttaaaaacaaatgtagtagaggtagccagaggcactggatggggcactggatcaaactgttaggaccggggttacggcttcaacttcagccatacgttagcagtgagaacttggctaaatccaacctcacttcgtttctggttttctcttctgtaaaatggggctaattatacatatcctgtctactctgccgagctgttctgaggataacaggagattgtatatatgaaattgatttttaaactgttcaataaaaggcattactgggattattagtaaattgagttttcaggcaatgttaaaatatcaatctgtcagatagcatagggtcttaaggttaaaagtacatatcaaaaaactgaatcaccattggaaaagggcttttaaaacaatattgctgtatttattgacagtaccatccaaaggcctttaaaaaagtaatcccttcccccacatcctttttttttttttggttagttgtgggtgacgaggactgttctctaaaaggtttctaaatgatgttgatattaaaaaatatagtatcaccatttaacagccttttaaagagcaggccctagcctggtctttgttaacaactgagggggaagggactatttgttcaaaggcttttagaggatgttgttaaaagaatatatagtgacatcatttaaaagccttttaaataatagttctccttcccttccaattgtaatgtccttggctttcatttattttgtactacaaactgaaaatggacaagccaacgtattactggctatggcaggcatttgctgggtggaggatgatgcattgctttaaaaaacgttgatgttcaggaataagttcagctctttgagaacatggcacagaacactgtactctgagcacagttctatactggccacccacctttcactgagctatggcacctttgcttgttttctctgagagtttcctaaagaagagaccatgcaaacaggaaaggagtcataactaagccattacaagagctccaacggcataaacgttatcctactgcccactgctacttaagctaattctcccacccaacttacagcaaaatccaactcctattctgctattgtattaaattatttctccccactatccctctaattttagactctacttcactaggagacagcagtggacacttaaacagttcctttccttatttagctctcagggagaagaaaaactaactcaactatttggctcaaagcacagtcagtaagctttgagatagataggtaagctttgagatagataggttagcttgtattatctttcacctaacataccagccccagggatatcatcataaaataggaaaaaacttttaatttcttatgctgcgtttttttataagcatcctttcattttaaaaacagaaattcctacaacactttgattaaaaaaataaacctttaaaaaaacctaagcagagtcctccaaacacactgcactttagttctaaatttcagtgtatccctatttttttgccaatcttgcacaaagaactcacttgttagttctacgatttgcttaaatcatttttatgtatgctttactctaataaatcatattacttgattaaatatcaaatattaaccataatacaatgttcagctcaagttccaactgatctattcaactgctcctgaccaaatccagtccataagtgatgtgagtcccattccattttgacattctttataatttaattttcatatgattatttaactttataactttaataagattacttaagttttttcttatgaaccatgtaggcagaaaagtgctgtctagacaataatttctttgcatgatttttaaaaatataactttagaattctgttgttttaacagcatgattatttgtgcctataattatgtgataatacgttttaaaatgtcttaaaatttctgcattaaaagtcatgtcatttgagacatgcttccattatctattgagataaatcaatgtttcacagagaaatgctaatataatagattctaataaatgaacattggtgaaaactttgaaataaaaattctgacttaaagaagcatcaaaaagacagcaacaggaaaatacagatgtattaaatttaatttgatatgactgatttgaaaaatttcaaatttctcttaatttgggtgctcctgggtgactgcagccaagaaattaaaagatgcttgctcctgggaagaaaagttatgatcaacctaaacagcatattaaaaagcagggacattactttgccaacaaaattccatctagtcaaagctatggtttttccagtagtcatgtatggatcttaagagttggactataaagaaagctgagcattgaagaactgatgcttttgaattgtggtgttggagaagactctttagagtcctttggactgcaaggagatcctaccagtccatcctaaaggaaatcagtcctgaatattcattggaaggactgatgctgaagctgaaactccaatacttcggccacttgatgtgaagaaaactgactcattagaaaagaccctgctactgggaaagcctgaaggcaggaggagaatgggatgacagaggatgagatggttggatggcatcaatgactcaatggacatgagcctgagtaactccgggaattggcgatggacagggaggcctggtgtgctgcagtccatggggtcacaaagagttggacatgactgagtgactgaactgaactgaccagagttaagtaaaaccgccataaataagaattgcttggttaggtagctggccataatccccacaggagggctccatttgaattttaggaatagtgagtgatcaccatcaacatcaagatctgggagtacatgcttatctgtggcattaggctttggctctgcatcagaatgccctccataatgccatggccttacccttctactcttcctcaacttgaaacatgaggaatgaatatcttcttctccccaaaggtgctatacatgaggtgatacacagataatggacccccaaaaggatctgagtctcccccacacaatctataaatatataatgatgcatggcaggggagaattaagatggctgaacagctaattttgagatgagattttcctgggttgtctacgtaagggaaagcaggaagcaggagagtcagtgttatagggatgtggtgtaaagacaactcagtcattgatggctctgaggatacaacaggctatgaactgaggaatgtgggcagcctctctctagaagctggaaaggcaaggaaaagaattttcccttagaacttccagaggaaaacacagctgtgctaacaccttgattttggcttggtaagtaagacccattttggactttgacctctagaattgtaagataataaatttgcattgttatacaccactaaattggtggtaatgtagcagtaataggaaactaatacagtaattatgataactatttggaaactactattttaaattcttgtgttgtaaaacccatctgtggagtctatggtatatttatttgcatacctgtttcaatggctgatgtatgatctgagaggcatcaaaaaattctgctttccctatggtattttcccattggacttaagatccaactagcatagacattaataaacttgaatggctttcaaacccgatagttacttgtcagaatcatctggaggactggtttataagaaattcacctcccctaagagtttctatatttttaatgacttttatccatttggttaacatataggtgctgagaaccagtgaaaaaaataaaagtgaactgtcttccaaaggctccaatttaatgctctgaatattatctaagactacttcttaacactttttggttagtatgtgttagtttttctcataaaatatacatatagaaacattctgtatgagttctatacaagcagaaacggattatagtagtcagacacttgagagacaattcccaaggcagacaagtttccatggaggaaaatgaaggaaccaagaaaaatataagagggtggggctaggttagagaaggagagggtaggtattacaagagtgataattctggagcacctctttacaatgctaacaattttttctatcaccatctttttctgaaacaagtacaataaaaattcagatttttcaaaacagctatactgagtctctgaatcaggattcttaacccttttacagtactcatgtaaaagttaacaacataaaccctgggataaataatggaaggtgtaccagtgggtgcttatgcaatcaggtctacatgagaaaagggaaaccactggaactacaagcaaatactgttcagaagaaactcaatccagtccatgttggtttgacagaaatatatgtatgatgacagaatgtttcttggtggtaattccacatctaaattattttatggaaggcattcagtattaccatgcaagacaaaaggattcttccctgaagactgggcagcattagtgacttcctctgtcagtgacctaagacaccttatacaagcctcccatggcagctctgttcatgctccatcgtactcttgtttatcatctgtttgcaaaagactgtgagatgtgttcaaaactgtaaccatggcttactctcttaatttgatgtagctcataccataatgttcagaatgtggaagtcactcctttcatgtttattaacagaatgctcacagttaaacaacaacaacaaaaaactttcactaagaaaactataacctccaaaaccttttactaggaacacaaagagaactagcacccatacagatatggagtctgcaaagaatgtaaagaactttaacctatattaactgttctatccaaactcttcttgcagatctgagatagctaagaaatttcatacaatcatgatatgtaatttttatgtttaatctgacacctgctcaaatcatttcactgccacttgatatataatagcacttctttggttgaaagatttgaaataagtattgagccacatatctataaaatatactcttgaagagcacactggtgagtttcagaatacacaaaatctggtcaagtaataaaaaaaaaggtatgttatgattttctctacctatttattgaaagactgatgaattgataaccttctctccagatgtgcagcattcttttaaaaattaattaaatggtattgttttctaaggaagaaatattaaaaaagaattcagatactaacttctgaattttctttaaactgttttactttttccctaagtgtttaaaatgagcaaggcattcaaacttgttgggtggtacatctaagagttttagcaaatgaagctacacaaaacttcaaattcttttcttgctttccaaaaaacttgggcaagtttctgattcaaatcaaatgatagagggtataagattaaattgacagtggctgacctatattcacaatctacctataatttgctcttgtgactaagttgtttgatgcaatccccagaagtaaaacaggcgtttgaacactttctggtgcaaaacacatctctgtcacaaagccatgtcttaatttcaaattcatattgagaatcactactttgagtagccctgccagtgcacaagacctgtgtgaagccatcgacaaacttgacgttttatgaagggccagccccctttcacactgacatcctctgtaccctgagtaaataactaacaattcatttcctaaccttgacttcagagtccagcctttccaccactctttttttttttcctcccctttctttccaaacaattgacaaagaacaaggaagctgattgaaggggtccattatgtatcaacttaaagaaaggcaaagtgattgatgaaactagcagtcaccttcactgctagctactgcacctgtatcctttttgtcaaatgacctgaaaatcctgctgacagtttaacattcactacaaggatacacactatggaactacagttttcagttatttctattcacagtgaaatctttagggatgtgatttgagaacaaaagttaaactttataatttcctaagctccatattttcctcttacatggtcactgattactattaactcgctctgcaaaaatactgtcatgggggtataaggacaagtaggtgtggtacgggaggtaatgaatgtttattttaaactttacctttctgtgtgttttgttggcagagacaagactggtaactcagcacgattccttccgccaaattattgatgaattacaattaattgtactgacagaagaagaacttgtgatttctcattttttctctaaaggtagtcaatatctcaaaaagtgattaattaaaacaaaaagtaaatatgcagcattaaaaaaaacagtattttacctaaaccatctaaagttgtttcccaactttccataggtgggggacttagtgaattcacaggataacccagtaactaagaatttcttcggtggatggataagtttgcctaaattaaagaactaatgttcagttataagcttcctgtgttagaaataaaaatttcactagtcaacagtgacacacttgagagccagcaaaatctcaaaagaagccaccgttctctatgtggacatagcaccatttcctctgggcatttattacctgttaaaaaccaatcttttggtgagtggcagttcagggtttttgagagcaagctgcaatatttcttcaggtctgcagagtcataattaaagctgaactgagcggaattggagagggaaggtcagcgaggtgccgtatgagagatgaggctgggctgatgggcaccaaatgaacaaattatgatgggccccactcaatgtgatgaggtcaaatgcttgtttctacccactgacagttcaatttccctgaaatgtctctcggttctctatgagctaattatgaatgaaaagttatcaactgcccacgccaaagggggcttaaatactattctgtggagttcttaatgtcaaaatattgttcaaaacagcatgctgtcccactccaaatacaatgtgtgggttaatctaaataccagtgaaacaccatcaattttcctcagttttttcacaatgtatacaacaaagcaaattctccagtacttgtcagcacttacaaaaaagagagagagatcattttatcaggtaaatctgcattatacttgcaactcacttccatggtaatagcagtacagtgcttacagttttgcatatcgcaggctacataatcttcaaatagcactgtacgttttgggggtgggggggaggggttggggaaataatgctattggattattagctcctaggcatcaatactcagatttaccccggcatacagactgattacagaaaatcagctcaagagtgattgacaaaatgtaacctccatttatggaaccagtttttgagaacaattttccacaggctgcctttatgatggacaatcattttctttacatctatataagcctaagtgcattcaacttctctctgaaatcttgtgacagatgataaacatttgatacaaccaaggatcctactaattaaaaacatgtatattgcttcaatcaataatacaaaaacagatggacattataaatttgctgtgaccctactatgtgccaatcactatgcaagggacttccatgtaaggctgtttaacacaataagtagttttctagcaatatacaacacatataaaagctggattcaatgaatgtcctgaggttaaagggtacatcacaatgaaagtaatatgatatgcataaaataaaaattaatagcactgagcttaaatcgtaagaaaaattataaaatatgtgaacacagtgcacatgaaaataacacatgtcaactttctttttctccactagatgaaaaggagttttggaatggctctataaggagagatttgaggtataaacattagaagtacttggtggaagtggagcagagagagaggaaaatcagttatgattcaggtaaaggaaactggacatcaaaaaatgagcctggagtagggaaaaatttttgtcatttaaagacattatatgcaggtatgtatacattatatttttggtaacttaccaaaaatgaaaaagtgtttaagcattgtctgtacatttgacacatatagatatacaacatcaatttatatgatactttaggaagtattatatatatattcatgtttatagagatcaaatttaattcgttcattaaaggatcctttctagaagttggttttttctaatttttattgtaattgcattgttctaatcttgtattataaaggcagctgcttgcctatcatttgtactttcctcgttaatcctgactcagtgaattaacctttaattacagccgttaaaattgaaatgagcctcttgtctggctggggctgccccctttcagagcatgattctgatgagaatttttagggtcaatgaatatgtcccatgtcatgtctgatagctgctaaagatgtgaggaggtaaatgttaccttagaaagatgtgctttaaatttttaggagatctgctctattgatgggaaaataaaataaaaatgttaattttagtttctcagtttaccaggctgtatttttagccaaattgagagcacataagatatataaagaatgggctattaagatacatttagtcaaacaaagtaaaacaataacttactctccatttcagtcttaaatgttacatgttataataaaagaaatatgtaaggatcatgactacttttgagatatgtgcttcataagaataattctcacaatgaggtagtaaactagcaggttaacaatagtcttttaagctgacatcagagggaaaggattctataataatgaaactggaaaacagaaaagattaatttcattcatttaatacacttttgatgaatttctattatggactgagcagcgagaacagaaaggccaataaaaaggccctgtcctatcttccagggacccagagtctaagccttattagattaatatatttctaatataaaagataaggcacctttcccctacactgacactgatgtttactaaagtcacttgctgtctccctcttaatttcccacagacttctaaagagctagaactgagggatgttagaaacaatctattacatattacagtcttcttatttcacagatgacaatctgaatggaactcaaaatttaacatactatcttaaatttacaagataactttggcaaggcacatacgtagtgaagcacggatgccaaaatcttcagtgaaaatatgaggtaagtttctgaaactgtacacttttaaaataaaacttactaggaaaactttcaaacataaacaaaagcagagagaataacataaagaacaaggcactcatcactacctttcaaaaaactatcagtatttgtccaatcttgtttaatcttttgttctacttcaaatgtcagatgatacagtaatttcatcagtaaacagtttggtttgtattatctaacagataaaaacttgtcaagaaaacttacaatactattatcacacctaaaagaaaaaaaaacctcccccaatttcatgtaaaatacagtgttcacatttcctcgacagtcatatatatatatctttttagagttggtttgcttcagtcgggattcaaacaagacacattttgttggtatctaacctaaattatgcatgttaaagaacacagtaaaaatttgttttgctatcttttttagcagaagtgtatagtagacctttagtaataatttagaatttaggggagatatttatatattcagtaatgtggaacagttgcaaatgtagagaaataacccatattgataggcctataaaagctgtctgtaattatattcctgaatgatttgaataacagtgtatctgatatattctaagataagtggcttttacttttctttgatattagggtcatagactgtacttatctatttttactccatgttctcctctctctggtaataaattaatttcttagtgttagtttggtgtgtgcctgaaagctaaattcattttcttttcctttgaagagaaacaaagtttctctaagtatcacagtaagatttttcatgtttagggaaagtttttcatgttaaaagacttaatactattaaataacacttaatggaatggaaaaccaattttccataccatgccttgtcctatgttcagaaaatttttggcaagcttttaaaagaggaacagaggtaacagaagttaacttgattgatacataattaaataataattaaaacatgactggccaatgcataataatctaagatatcttaaagcttaaaaaatatttttcactgtagatatcacaattcaacacaagcaacaaaattcacaacgtggcagttgacagtaatacaatgttcaatcagtttcaaatgtggaaaataaaattgccagaaaagattaaattcttttaaaataactgttactctaaaatcttttatttctgagtgtagtacatataattgtaattaatgaaaactaaaaataataatcttaggaaaagtatcaagtgaactgccttaagctctaaagatggaacccacagcaaggacaggaactactcaccacaaagtaacaggaaggcccgggccttctttaccatcatgtctttaatccttctgtttcttacaaattaatacacatattttctttgttttggtggtaacctttttttttgttttgccataaaaactactcttagcaattgatagagtggatttttcactgtggagaattcaagacttaagactgccatatatttgtttaaggcaaataaaaaatatttttacaataaaaaaacctatagctaaaattgataacaatatctttttaaaaagcagctccttttaataacctaggacagggagaaatgataatgatctgttactaactatgagacctttgaattaatacagaaataaaaagataaagcagtaatacagcataccttaaagattaatttaaaaattaaagcaactcatatgcagaagagaattaaataaaagaataagatgggacatggctgggcaatggaagcacaaaatactgtcagactttaattaaaaaatgttttcaatttaagcagacccaggccagtgatttttcattatttttaccacagttccatgactactgacagtttcatcagaacaaataaaggatttttcccaaatttaaaatgacaaaattatttttaattttaacttataatttcttccttctttaaagtcaaggaaattttcgatctgagctggacttgtcccttagcctgaggcttgattaagtttttaaaatataaaaaacacatatttaaaaaaatacaatttttccagcatctcagaaaacaatctttaccacagacatgttatcatttgtatgggaatgaggctatgttttcgtaatatctagcatatgacttagtaagacccttgtacaaaaactctggaagcaatctgtccttgtagacaaactagaagaaagccagcactctggcggtagaagacagcagattggaaaacaaaattaaaatgctctgctgctgctgctaagtcgcttcagtcgtgtccaactctgtgcgaccccatggactgcagcccaccaggctcctccgtccatgggatttttcaggcaagagtactggagtgggttgccactgccttctccgtaaaatgccctaacccagtatcaattttaaagaagtgaaaggcctagctaagatctaagtccactttcgagaaatggagatcaacttcagttacaactgtccatcattatgatgcgattatctgagtaattccacaggctgttttagcaaattcagactgagaaattcaggttctgcatcatgaattatggcttgttttttcttcatgttgttttaaaactgacaaagtgacttcagtgccaaaagcaggtctgttaggtactcttgattttccacttaatttcctataatacaaactgggtcaggatctcattcctaaccatggatagctgtaactcaagtagttgccaatctctgtcaatagcagaagctgtaggcctacttgccagttctcctatactcctttcagaggaactgaaacattatcagaactaatgataaacatgaacttcaggtagtaaacttggtttatatatttaggaagaaaaaaaaaaaaggcttttccttgtgccactccgcctgttcaagggcattacatacgggttttctttttcttactttcagcctgtaaatcctggaaggggttgggttagtccataagtcatgtctcactcttacaattccatggactgtagcccaccaggctcttctggattttccaggcaagaatactggaatggattgccattcccctcaccaggggatcttcctgccccgggatcgaatctgggtctactacagtgcaggcaggttctttaccgactgagccagcaggaagtcctgaaggggttgggggcggagggggccttagttaagtagcttcatattgataaaacaatgccatcttttggctgctcataggaaaattccatgctgactacacattataataggcacaaacctcaggttaatgttgctgctgctactgtctttacgggacatcgtgagaatctatttcttcattaagtgatttagtgacgatccacagtgtcacttcaaaaaaagcagaggtgaacagcatgtactcaaaattatccatctactttttgttagagggatggtagttcagatatttaaattctaaactgtgttaaatgtcaaaagttaactcctgctagattttaagctactactgaaataggtggcactgtgtagtgtagctaatataaaataaccgtatttatgtatatagtcatagaaatgctgacaacctgcatttgtagaaatatcccaaagagcaaactaagttacaaaatgaaaatacttagtataccgaagttacataattttgaggaaatttttattttgttttgctcttactcaactgtaaactccctaagatctggaacatagccttgtacacaactacatctttggctcctcctcatattccgccctgaataaatacttgttgaatgaaaaaaaaaaaaacacttaactggcatatgtagtatggaatctggtctcatttaaagacagatctggactttgttctagctcttgagaggcagcctctgaagacttgtaatttccagagtgatggagtgccttgattattcctggtgggcccctagaaagcttggcgaagcagataacccaagatgggagctgaccacaccagaaagaccaaccatatgattatagagggttggggctctagggcgctgatatcagactgacttagaggggaagactagagagtgagttcagccatgaggcagttaattcagtcgacactgcttacgtcgtaaagcctcaataaaaactggacatctaagtttggtgagctaccctggttggcagtactcctgtatatactaccaactccaacacaagcaaagctttaagtttgggacacaaccagaatctcctccatagacttcttcctttggctgatgctaattttatcctattgttacttacaggtggcgctagtggtgaagaacccacctgccaatgcaggagacataagagacacgggtttgatccctgggtcgggaagataccctggaggagggcatggcaacccactccactatttctgccttgagaatcccatgtacagaggagactggtgtgctacggtccatgcagttgcaaagagtcggacacggctgatgcgactgagcatgagcatgccacagcaaaactgtaatcctaaacacagggttttcctgagttgtgtgaattgatctagtaaatcatcattcttgagggtagtttcagaaaacccttcaacttgcagctgccttagcagtcttggacaaacttagcagtctggaggactctgcataacatcatgtgcttagttgctcagttgtttgtgtccgactcttcgagatcccatggactgtagcctgccagccacctctgtccacaggattttccaggcaggaatactggagtgggttgccatttccttctccagggtatctttctcacccagggatcgaaccaacatctcttacagcctcctgctttggcaggcggattgtggattctttaccatcatgccacgagggaagccagtaacatcaaggaagcctgtaacatcaagttgggctaactccaaataacattgtatcaaactgacgtttcctttttgcaaccctggtttctctttcatggactgttcttggaattacttactaatccttaatatattaccgctgtcctttataaagattgcttttcttaatgaaccttcccacagcctcctaagttaaattccacttagggactgtgatccatgaggatcaaactggttatattacagcagctaagtcagcgcttcctcactaatgtaccacaaatgggtcagaggtatgctgtgctactgcctctgccattaacctcagaaatgtcaggtgttacctgtgaaactggagctccaggcctgggtacctcccatcttctgcagcatctctgtttactccagagcacaacacaaatactgtgtgtgtgttagtcactcaggcgtgtccgactgtttgctatcccatggactatagccggccaggctcctctgaccatggaattatccaggcaagaatactgcagtgggtaaccattcccttcttcaggggaccttcccgactcagggactgaacccaggtctctggcaaattctttaatatctgagccacctattatcacttttttctatgtaccgagatataagaaagaaatcattattataattttctcatgatagtatgtcaccaacattctccagcatcagacttggttattccaacctctatgttatgctttagccacattaaacaactgtttctccaactttccaacatttctaatactctaggtgaacaatgcatacttgtgctgtgctctacttagtcgctcagctgtgcccgactctcagtgacccgacagagtgtagccctccaggctcatctatccatgggaattctccaggcaagaatactggagtgaattgctatccctcttcccaagctagggattgaacccaggtctcctgcattgcaggtggattctttactgtctgagccaccaggaataattcatttttatttcacatttactcttaatacgcaaactttatccctcctcttcttttctcatcctttccaggggaccaatattctgaggattgctactactgactttggggggtctagggtataagaatttagaaactcttagcctaacaataatatagtaaaaaaaaaaaaaaaaaagaacttttctagtaattcactaaaaactcagtttctttactgatatactctcagttcagttcagttcagtcgctcagttgtttctgactctttgtgaccccccagactgcagcacgccaggcctcactgtccatcactaactcccagagtttactcaaactcatgttcattgagtctgtgatgccatctaaccatctcatccgctgttttccccttttcctcccaccttcaatctttcccagcatcacggtcttttcaaatgagtcagttcttctcatcaagtggtcaaagtattggagtttcagcttcaacaccagtccttccaatgaatattcaggacttatttcctttaggatggactggttggatctcctgcagtccaagggactctgaagatctctaacaccacaattcaaaatcaattctttggtgctcagctttctttatactccaattctcacatccatacatgactattaaaaaaaccatagctttgactagatggacctttgttgaccaagtaatgtctctgctttttaatatgttgtttaggttgatcataacttttcttccaaggagcaagcgtcttttaatttcatggctgcaatcaccatctgcagtgattttggagccctcaaaataaagtctctcattgtttccccatctatttgccatgaagagaggggaccagatgccatgatcttagttttctgaatgttgagttttaagccaactattttaaatttttatttttttttactttacaatattgtattggttttgccatacatcaacatgaatccgccacaggtatacatgtgttccccatcctgaacccccctccctgtaccatccctctgggtcgtctcagtgcaccagccccaagcatccagtatcatgcatcaaacctggactggtgattcgtttcttacatgatatcatacgtgtttcaatgctattctcccaaatcatcctaccctctccctctcccacagagtccaaaagactgttctatacatctgtgtctcttttgctgtctcgcatacagggttatcgttaccatctttctaaattccatatatatgtgttagtatactatattggtgtttttctttctggcttacttcactctgtataattggctccagtttcatccacctcattagaactgattcaaatgcattctttttaatggctgagtaatactccattgtgtatatgtaccacagctttcttatccattcctctgctgatggacaactaggttgcttccatgtcctggctattataaacagtgctgcgatgaacattggggtacacgtgtctctttcaattctggtttcctcagtgtgtatgcccagcagtgggattgctgggtcataaggcagttctatttgtagttttttaaggaatctccacactgttctccatagtgactgtactagtttgcattcccaccaacagtgtaagagggttcccttttctaaacaccctctccagcatttactacttgtagacttttggatcgcagccattctgactggcatgaaatggtacctcactgtggttctgatttgcatttttctgataatgagtgatgttgagcatcttttcatgtgtttgttagccatctgtatgtcttctttggagaaatgtctattaagccaactttttcactctcctctttcactttcatcaagaggctttttagttcctcttcactttctgccataattgtggtgtcatctgcacatctgaggttattgatacttctcccggcaatcttgattccagcttgtgcttcatccagcctggcatttcttatgattttctctgtatagaagttaaataagcagggtgacaatatacagccttgatgtactccttttcctacatggaaccagtctattgttacatgtttagctctaactgttgcttcttgacctgcatacaaatttctcaggaggcagatcaggtggtctggtattcccatctctttcagaattttccacagtttgttgtgatccacacagtcaaaggctttggcatagtcaataaagcagaagtagatgtttttctagaactcttttgcttttttgatgatccagcggatgttggcaattagacctctggttcctcttccttttctaaatccagcttgaacatctcgaagttcatggttcacgcattgctgaagcctggcttggagaagtttgagcattattttgctagcatgtgagatgagtataattgtgcagtagtttgagcattctttggcactgcctttctttgggattggaatgaaaactgaccttttccagtcctgtggccactgctgaattttccaaatttgctggcatattgagtgcaacactttcacagcatcatcttttaggaactgaaatagctccactgcaattccatcacctccactagttttgttcgtagtgatgcttcctaaggcccacttgactttgcactgcacgatgtctggctccaggtgagtgatcacaccatcatgattatctgaaatactctagcaagcaccaaaatattcctttttgaccatctctgggccaactaccaattagtctcatggaagactgaaataaacactttgttcatacacaatttttactagttcagctggtaaagaatccacctgcaatatggcagaagttggtttgattcttgggttgggaagatctgctggagaaggaaaagtctacccactctagtattctggtctggagaattccatggactacacagtccttggggtcgcaaagagttggacacgactgagcaactttcactttagtgtgaaaaaggaactgttctttggatttcattataaatattttagaaatttcaaaaaatgaaacttatccatattgtactaagctataagaaaataaaaactcactgaaataaaaatcacatatgacagagaatatgataatctacatggccttctagaactaacaccaaaaaaagattcccttttcatcatagtgtactagaatgccaaagtaggaagtcaagagatatctcgagtaacaggcaggtttggctttggagtacaaaataagcagggcaaaagctaacagagttttgccaaaagaatgcactggtcatagcaaataccctcttccaacaacacaagagacgactctatacacggacaacaccagacaggcaataccaaaataagattgattatattctttgtagctaaagatggagaagctctatatggttagcaaaaagaagaccaggagctgactgtagctcagatcatgaattccttattgcaaaatgaagaaagtagggaaaaccactagaccattcaggtatgacctacattaaatcagttacgattacacactggaagtgacaaagtgattcaggggattaaatgtaatagacagtgcctgaagaactttggacagaggttcgtgacattgtacaggaggcagtgatcaagaccatcctcaagaaaaagaaatgtaaaaaggcaaaatggttgtctgaggaggccttacaaatcactgagaaaagaagagaagcgaaaggcaaagagaaaatgaaagatatacccatctgaatgtggagttctaaagaatagcaaggggaaacaagaaagccttcctcagtgatcaatgcaaagaaatagaggaaaacaatagaatgggaaagactagagatctcttgaagaaaatcagagataccactggaacatttcatgcaaagattggcataataaaggacagaaataatacagacctaacagaagcagaagatattaagaaaatgtggcaagaatacacagaagaccgatacaaaaaaagaccttaaggacctagatgaaagtgaaagagtagtgtgaaaaagttggcttaaaactcaatattcaaaaaactaagatcatggcttctagtcctaccacttcatggcaaatagatggggaaacaatggaaacagagtttttattttcttgggctccaaaatcactccagacggtgtagccatgaaattaaaagacacttgctccttggaagaaaagctatgaccaacctaaacagcatattaaaaagcagagacattactgtgctgataaaggtccatctagtcaaggctatggtttttccagtagtcatgtatggatgtgagagctggaccaaaaagaaagctgagcgctgaagaattgatgcttttgaactgtggtcttggagaagactctggagagtcccttggactgcaaggagaatcaaaccagtctatcctaaaggaaatcagtcctgaatattcattgggaggactgatgctgaagctgaaactccaatactttgcccacctgaggtgaagaatgatgtcatctgaaaagaccctgatgctgggaaagattgaaggtggagtaaaatacataatatataatataaaatattataatataaaatacataattttatattatgtattttacctcaactttataaaattctatactcacactattttttaaatgtaaggagaatgaaggaagaaaatgctattatatgtagtattttccagtttctctaggcaaggagttatatatatatatatatatattacccccaaagcagtcattttgtaataggcatggtaagcatgtatatgaatgatatgtatatgaatggggcttccctggtggctcagacggtaaagcatctgcctgcaatgtgggagacctgggttcgattcctgggttgggaagatcccctggagaaggaaatggcaatccactccagcactcttgcctggaaaatcccatggatggaggagcctgataggctacagtccatggggtcgcaaagagttggacacaactgagcaacttcacttctcactcactcactcactcactcatcacttaattttatgccacattttttaatctcattcaaagatttataaaaccacttttattaaggctatacaacattctttaatttgactctgccatacttgatgcaaccatcattctcctatcaccaggcattgtggttataaataaccatgcacataaacctttgtatttctcattatttccttagaagaaaaacttacacgtgagattactgggtttcccttgtggcttggtaaagaatccatctgcaatgcaggagacctgggttcaatctctgggtcaggaagatcccctgcaaaagggaatggctatgcattccagtattcttgcctgaagaattccttggagagaggagctggtgggctacagtccatgcgactgcagagttcgacacgaatgactggctaacactttcactttcacaagattactgtgtcaaacaatatgcatattttgatgactctatacacagatgcccaaactgccatccagaatgacggtttagaccgacatcagtggagaagtgtataacgcctgttttactgcgtccctcatctgctttatggattaatccagggaagattcatccaataaagattataccacattccccacaactttcacctgtcttgctgggccttcataacgtgaaactctgtttaaaaatcacctggtcctagaacacttttcatatcagtacaaagcagtctttcatgggagggggggcccacattgcaaggttttaaaataatcaattttccaggaataactatgagaaaaaccattcaatgttttggaaaatcatgtaacaccacacctcatggcatttgggttgctaatacaatcatatagtttatcagtttgcatttagagttgctggcatcatttcactacttcactacatttctaatgtagtcatggtcaaacatttaccaatcactgtactatttattagaaagtaattttttctttctattgaatcggggtaatgtgttgatttttaaattaaggatgtactcatccatgaattttattttaggattcaagagactcttgcatttgttgaggtcccataccattattggggcttttaatttttgaggactagtctttgagtatttcctttgatgtctttagtctatttctttctaaatttgtacatctaatgagaaaacttatgctttggttcattcagttttctaaagcactgtttcgagggctgaacgtgagatcaggagccatgatattctgtatcagaacacttgatttatttccataggttctacttctcaaggctctacttttttctttgtttaaagttctattggtttctttattggcttgttgctggtgaatttctgattgccattcttgttacgattacttggttgaccatttggttagcttctggggatgaaggctgtgatcctgcttcacttggtagttcttttttttttggcatactctttgcatagagtgcttttgaagagatcatctcaataaatattttctttagtataaaaagatgagtccttcaattactttgtgataagtgaaaatttactacaagcttttctaatctcaactgcattcttcttacagctaataaagtgtgagtctactcagggtccattatcacgtattataccacttccaaaaatattagctaatatttattgagtgatgacaatgtgccagtcactgttctaagagcttcacatttattatctcattaatctggcaagaacctgtgaagtagatattatcttcataggaaacttaggtgcagagaagctacttactaatttgcctaaggtcacatagctagtgtagcaaggcagggatttgctttttggtcatctgatatcaaacccaagttattcatctaccaccttattgcctcccaagtttttagggtgctccctttgcctcaaaaacttactgtgtttcactatagatttttctgatgaccactttctccttacagcctactacagatgcttaataaatatttattacttaaatgaaataattatccactttcccctcatctcttctaatgtgccttgtccttttagcaacaaggacaaactaaagtcccaaatactgctttactcatttctgagtgataaagagataatcatgttctacaaactgaaaaacaacatgataaacttaagagttttcgcctgtattttctgagctgaccaatgctaaagggaaatgcatggagctcttttgggtgtttcattgcacagccttgatatcacatttgctttgaagaggagatctgttggtagcactgtataagaattaggtacttttctctcttatctctggcagaagcagttctgtgtttcctggcagttcaaatcaccaatcatgtaccctgctagccctggcaactactggtacagcagatcttttcaagctacccgtgtgcccatcagaacttgctgtgctattgcttagtttgtcagatttccaacaaaaaattaataggcggtcaagcatatcaacagattacacatcttaggtagcacgcctgatttagagagaaaggttagtggatataacatgctaacacagaaaaagttactgtagtttcagatactctgacaggctgatggctttggcattattttgagacaggtaagcctcttgccttgctgccaagtcagcccccacaaataatattaaagaattttcttagagacattaaggcatgtacatatataatgcaaatagataaaaagataatgtaaaaagaaatacaatcttgactttttaaataaaaccaggcagttttagtagcctatggtaaaggaatagtgcggtaggcatagaatgatgatgagaatgggagtctcttcatgtagaaaacaattcttcaagacagaatctatgtatataaactaattcaatgtggcaaagaactttcataagttagagatacataacagtaccagagaaaaatgtacacatggtaagtaagtgtggataacaaggagaaattgagacaacaatggtttggatacagctaattaaaaatatatttacaaaattaaaaggttaaatttgaaatacatttgttaagaggaagaactgtttgaggctaagaatctaattatttgtattttaataaaaaaagatgcaatggcatcatttgaaaactgagctaatacattttgaaaattacttacgctaatgactgatgaagtagctgacaagtttaaaccttcaagatcagctatcaggcttggagaaagagctggggtgggaagtgcaactggagtggacaccgggttgactgaaagtaaagggccaaattagcacatgtgcatgaaaatttaattcatattactaaaagcaacatttttattttgctggtaaatctaattaaattactttgattaataagtctatgacaattctatttaacatcttgatttagtcaagctattatcaagtcatggcagttattagtcttagctttcaaaacataatgacaaatcctataacaaaataagaatataaataccttgagtaatactttttgaaaattttaatctcctaacattatcactaacattaatcacccagtaacttaaccaaaagaaaaaggtaaaggaacattttttcagactaatgtaaaggataacaacagctctcaagagagttttccagttgggttaaaagccttaaaagagtgtttattaaatcttttctctattttattctccactgtaataattataaggggcccagactacctaattcacttctaattatactttgtcagcaaaagctatgagctagatagaaatatttgattctatcaataaaaaaatttgaaaatcttttttaaatacaaatttgatcatgtcactgtcatgcttaaaactcttcaaagatttacagttacgtacaaaaataaagtccaattccttatttaaatgtacaaggtcttctatgatctagctctgcactgcccaatagaactttctgagatgatggaaatgttctgtaactgtaatggccaacaggacggtcattagcctgtataccaactgcactcctgaaatatggctagtgtgatcaaagaactgcattttaaaatttaattaaatttaaacagctacatgtggccagtggccagcatactaggcaggtctagcttagctccaatttcaccagtcattcctatgttttagctctaccaagtaagtttccaagatcttgtttcatgtctttgaaccttgtatattctattccctttgcctaaatgtccttctctggcttgttcaccttgcaatctatatccattaaggtatcactgagggggaaggcacaactagactccctgaaacacagtttttgtgtgtcttctttgttctactggtatacttggatacacttctacaactatacttctcttgtaatacaaatgtgtgtctttaaatgttttcatttctcctggtctgtgtgagtggactctgacacattaattttcagtacttagtcattgttcaactgtttgttgaatgaaataaatttaaatgtggaaaaagttttagcttccaacaagttctcattctaccacaacactataaagtaagtaacatttacttcatgtggcatcacttttcaagcatctttttctcactttagtctcacataatcttataagttaggcagaacaaatattaattcataaaattatcattaagtattttttgaacaatggagcaagtgagagacaaagaagttcaagatatggtccctgacttcaagaaacttaaaacccaactgagaaaaaaagatatacatgcttgaagacaaaaaaaaaagtaacaatacagtccataaatgatattgccaaaagaagaaaagtttcaaaaaggaaatctgaaaatctcaacatgcccaagagaaaaagcagcgtggaggctgggtggaggagggagtggagcccctcagctgctcccctgctcttaaaggagtgtgttcttagcgtgaagcacagctacagtatctccatgcttcctcagacatatgtcaaaaaccactaacaattagcaagtgccatagggaactgcaaaaaaaaggatcaatggggatagagtggtaagagaaggcttggtgagtaggagggaatgaagctcggttttaaattaagggtagaattcaaattaagaggaaaggaagaagctggttagttactgaatgagatgatgtaaacaaaggctgagaggtgggaatgaagagctcaggggattggatttatcttataaatcaaagagaactatgaaaaatctacaagaaagaggaacagtaagatatatggtactgcacaataattagtcagaggctagggtaagagacagactgaagaaacgtaaagagcactcaggttggcagtgaggaagaatttacgatagtttaggcacgatatgatgaggactgaagtaagataatggtatgaataggcagaaggggcatttatataaagacagtgtaaaatgaagcatacggagattaaaacttgcaagatcataaaacaagtgaatggaagaccactgtaggacaagaaattggttcttccaattggaataaaaatgtgttgcctttccatgcaacatgtaacttttccagtgggctctaagggcatgtttgtccatttgtttgtctatccaaccaatccaaaatattagatgaccacgtaagaaataaaaaactgagtatgaaatagcctctgattttaatcacagcttggccaaagacagagaagaacaattcacaccacaggtaagcctgactcttacaggaaaacatataagctttcagtatcatttcagaagactgaggttctggcattaaagaaatgattacacatctgtttacaggtctggcaagatggaagctggcactgaaagtttatcctaaatagaattctgcaggcagctgactatggtgaactaatgagtaagaaataaaatgactctatagtgcttttttttttaaggcatacaaattaaaatgagataccatttccacctatcaaactggcaaagtcaatttttaaatacaaaacccagcactggtaaagcagggtaaagggaatctggcactctcataatactactgtgtaagtttgtaccaactctgtggaaggcaattttagacagtagaattcttcatagctcttatcctggtaattctatttctgggaatttatcttaaggatatagtcatggaaacaatgcaataacatacttacaaaagcatatagcttcactgattaagacagcaagaaatggaaacaatagttaattaaataataagttttatttccaacaatagtaaacttacagtataaaggataaccatacagtctaaaaagttgttcaggaatatttatggtaaagaaagaaatgtgaatgataaagagagaaagaggtaaataataaaacaatctcaaatctccaatttggaggaaaaaggatttgcctatgaaaagatgctgaactaatttgttaaaatgctaacccattttcttttcaaaaccttctacaaaacactttctttactaaagtatatttaataattagacagttgttcttctgatcaaagttatgcttcaaaatctcagtaaaacttttaatatataaaaatttttaaatgaataattactgggtattaaaaacaaacagaaataggtcctaggttgagttaaatgtaagttgggatgaaatttcccttaaaaaaaaaacttacatttaaattcttaaaacttagtttttaagaaaatctttatttctatatacttttaaaaaagctttaaaaagcagtaatagaaattgtatcattttataggtttctcttttctccttagctgccagaaaatccagagtcaaatgtaaggagaaaaggaatgagtacactctagtactttgtaacattgactcttaattcctttttaaaggtctgacttttaaaggttgttcttttacagtttaaaacctaaaactttacatataaatgtaaaacattcattgtctcagagagatacaacataagttgcttttttttccccctctcatctgtctctaggtcattcttagatcccatagggatcggagctaacattgttaagtatatcttctgtagccttccagaaatatactatgtataatcatatttgtatttgtctgcaggatatagttcttcttttacttctttttttacagaggagtcatactctacatgtatcttttcaaacttacaatgtttcatatacataataacataaactagcatattaaaaaggtgcttcacttttcttaattgttatatcacactattggtagacatttattttcagaactgggctgtaaaaataatgccgcagtgaaatttctatatacctttgtacattttattaattcaacaaatagttactgggttcccactatctcccagatgttgttctaggtgcaaagaataacagcgagcaagacagacaataaacaatacaaaaaaatatttaagataatttcagatagtgaaaaatgtcatgaagaccatcaagaataattcaataagtatgtaagagaaggtgatctttaagctgagatctgaaagataaacagcagcttgccatcagaagatcaggaagaggtgttcttagcaagggaaacagtagaacaaaggcccttggcaggaaggagtctggcatatttcagaaatgcagaggaacagtgtggataacaggtaggcaggagtcagagcactcaaggaatatggatattaagtgtaaaattaagccactaggttaaagagtctaaaacaaggatggaataagaatctgattttgctagtttatctacaggataaattcctagaaaagaaatcctaggtcaaaaggtgtgtggaatttaatatcttgacagacattgctcaaatgacctcaaaaaactacacttatttatatgcctatgaaaaacatatgtatggtatctgcttctccaaaccttaacaatattggatgttgctttaaaaatcttagccaagaggtaagaaatgatataaactttaaaatctttgccagtaagtgagaaattattcaaatttggttccaattttatttttagtttctctgttatgtatttttcagtattatatattttaatttctctacactaaggatttgccatgactattagaaataggcaaggtaaaccacatatatagaacagttctatgacagtatgacataaatgcataactcacatctggcacaggaaaactagactgcaaaatgacggcagtttaatattcagaaatctcacttattgttactcttcctctagtgcaaaacctacctacccacaaattagttctactgtctttctcacaattcaggagactttaaaggaagatgaatacacatctttgtaaaggattctaacttcttagaagtaaatttggtgcacaaagagtttttgcagttaaaatattgatagatataaattttactgtattccaaaaggtttgtgtttatttctgttcacaccccaagtgtggcaagtaggaaacagtgatgtcctttacatttccaattacatccctaattccctatatccttaagttagatatcttgatccccatagtcaacatttaacaatgtagaagttgtgaggtatggataattattcactaaaaccaaatagcttaaaatgaatttgatgcattttatttgaccaattatacttatttaggtgatacaaaactaactgatatacagaacagatgggaaaaaatactaatagaaataattttttatattttcttgtctatgtctataaatcttttgtaatagatgttgattattttgagacatgtaaatgaaagttactataaaaatgaaaaatattactgctaagcacagattaaaagatttaaatttcaatacttacaatcatctagatctagaagtgaaacatctttggtaagaggatttctatcttgctttgtctttttttctttctcctataaaataataaatattttatttattgcatattctatcttaaaaatctatgacatagtccttaacatttcaaaacaaacatttttcccctttgcttagtcttccagaaaaaaatcaaattaagtttttatatggttatgtgaaatgcttttttgaatcaaaaattcagttagcgcatgatatttcttcttcaccttgcaaacttcaaaaatattttttacttagagattataaaggaccttcagaaggaaacttaaagtaaataattattttatattctgacaacttttggtaacataaaaatctaacgtgactctttggtagaaagtgtacaaatattctcaaagataattttaaaacaagttgatttaagaaaaagaaatgcttaaacaatacatgcttagctctgtgtttagcttaaacaatacatgcttagctctgggcttgggatagctcagcctttttgagaggcagtctgtaacaggcactgtactaggaactttacatttcaacactgttttgcatcagacttcttttgccaaagatattaattaaaaaccataaatattttcaggctcttgctctttagggttacaaagaattaatttactttcttttctattttcctttcgggagggtaaagtattccaatatttctatgcataattagggcttctcccacctcaaatttgcttattcagtctattatagttttgaaatgtggatacctgtagattatagattcctaagcctcaaggtagtcacagtttgtttagagattcagaaaagatgtgtaaccatgaaaaaaaaaaaggcacagtactgagtagaagtataaacaattaaagaccaacaaggattagggtattaaacagatttatttgggccatcgttacctaactttataatttttttacattaaaccttcacaagttgaaggccaaaacttaagcttacgacaaaatgttgttgtacacctattcagtcattcattgattcatacatatgtatagaatttttaatagattctgtgctaagcaatggaagtaacacaaccaagacagacacagtctagtacctgccttcagatgacttataatccaccaaaggagtttatatcttattgctaatgtaagtaagtacaaatatttttgaagtagtcctttaactacagaaaggtatcactaaagcaaaaggtactttactgacatttaaagtctatatagtgttagagctcttatagtagtgaacatacatgaacaagagcaatatatcacataacatatctggtaacattttaaaacgatttaaatcctgttttttttccccccttccaccaatactcagaaaaattattttcaaggatcacacaataatacacattaaaatactagctagaaacatcagcactgattttcttcaaaatatttatttatgccactgaaaactccaaatcatctaggtgggttttaattttctttcattatttaaaaacaaagcaagcaatatgtgtccttctctccacacctgaaataaacaacaatttctaggactggaggaagaaaaataaaagaaatgttagttctgaagctgaaatgtgaaagttgcaggtaacaaaaacacattcagaatgaatatgccatctcaacaagaataacattcctgtgaagaaagcacataaaacaaaaagcttatcaccatgtgactttatcaaaatgccatgctgagcacaatgggtgtagcttcctataacctacaatggtgcatggctgtctttatggaactgtaacctccccacctgaaaaattagaaacctatcaaatcaggacaaagttaaatctggaggcaggtctatataccttattttctacttcacagctaagagtgtgtaacaatatctattaaacacacatcaggtcacatataacacaggacagaactgcatgtggaattggcataatctcttattataagcctaaaagaaaaagaaaaaaaggctctcaaaaggacagaatttcattgactttctgagtacagcaaataactggtgactgaaatacaacattagcaatagataacggtcattcctactgaattgaaaaagccttgcattctgaatcaaggctgtaaaaagcatcgtgatgtgtttggcattcctctcttatttttcatttctcattttaaaaaatccatagtaagttcaaaacattttcatacttaaaggatctactttaaaaataaaaatctgaattctaaacaaagaagttaagagccccattccatcaaacatttctccatttgcaattcatcttggtaatagagacagaacctgggtaaatgcatataggacttgaggcaggagatttttcttgctcaatgcataattcatgtgctccgcctgcaaagtgtgtaaaatgagaatttcacaccacagcatgagccatggagctgcagagaaaaggcagacgaaatcatattttactgtgtgaattttatttcttaccctcccaatatttatacaaaaccatcattgacaaaccaaacacattgacagatcacccactgtttccattgtgttagtacttgagaagagatcaggcagaaagatagacaatttgtttttgtatatttttttaaatagaggattaggtttttaacagctgagtgactgtattagacttttataaggacaacagtaactgatcttaaaatctcactacaaaaatacctagttatcaattcatcatcctaaaatctccatttgtttctatggtattcgattatacacctcaacacatcaacattttcaaaatgaaatacaaagtcacagggttaagaaactgatttctatttaacatatttcatttcaagtaataaataaaagattctggaaatacttattaagctccaaagaatacaaacaaaaaaatgtaataatataccttgtaaggattttttaaaatctattatgtatgtttatcttcatgctgatccaaaaaaaaagaaaaagggaagcaaaaagaagatctaacacaacaaacatcaaatatgcttcctaactggaaaccattataaagagttttgaaatttaaaactataaaacaggataaatggtaatataagtttgtcaaacctacattatgctttggaagcaacaaaaattcaaggcttatttctagcctcacagggcaaggtatccacaagaaatattttcagctagaattaccaagcaaagacaatttaatgattctcttgtcttcaagtcatctaacaaatctgattttaaaaatctgaggctcacacttacactttgctttaaaacaaaattacactgccagaaaattgagacttctatacaagttaaaaagaagtctaaactgttaaacaactcttccctattagattatacctacttcaataagaaagattgcttaatggcattcactctgatttaaagatctcaattgaagtgaaatgctatttctgttctggagaacttaaaatatgaactaaattggaaaagacataaattgaaagaggcaagcctttgaattgtcagagtaaaaactaatattctacagtcttcagagaagttatataattgcaacaatcataaatacctggaaaaacccaagtaaaccttgtttcctattcacagatagggcagaaaactaatcagaaaatagttcctttcacaatctattcatactacatctattcatctattcatactacatcccatatttactttatacccaagaatctttcacatggtagatcttttactgaggtatgtctcagtatttactgacatctgaacactactcataagacactgaccagtccaaagagcacagaaagatttaattagcttctgtgcacctctcaaaaagagactaacaaagctttgtgagatctctataaatgtgataaagaccactgacaaaagcatcttaaacactgctaggatatagagatgatattatttttcttaaagctggtaaacatattaaccttaattttgattcaaatatggaaatgctcttagtattaaatgctattaggtacaaatatattaaatatatctattttccatcaatggattattatgcttaatataaagtaaataattaaaatactactaatatttttaaggaaatacataaaattattcacaataaattaccattatgacttaaaatttttattattttaatcacagcttatttgaatatttagcaggtgctgcatagacattgaggatatcatcaaaactactgaatcacagttcaggtatgaatagtgagacaaataaggtgatggcagaaacaactatagtaagtgggaatgccctaacttatttgtgtgttagtcgctcagtcgtgtctgactctttgcgaccccatggactgtagcctgccgggctcctctgtccataggattttccagacaagaatactggagtgggttgccatctcctaacttattggctgattataaaaacactgaagtcatgttcaatgaagaaaaaaaaaaaccctggcaacttaagaaatatattttaaataaaatttttaccatctgttcaacacataactttaactacaggcagaataaaacatggtataaagtgatataaatgtgaatgtcttcctgatttaatatggcctgtattactcaattttttctccactcttctgtgtaaaaaaaaatatctttcctaaaaaccatgtgaaatatgtgaaagtactgaagatacagattaaaactaattttgttacaggcattatacaaactccaagagatagtaaaggacagaggagcctggtgtgctacaggccatgaggtcactaagagttagacatgacatagcagctgaacacatattatttcataaaaggattagactcaaattaaaatgtttattaaatttagttcaggaaagaacatctacaaataaaaatatgcttgcccatcaaaataattgtaactgaagagaaagataattttctttggttttcactgacaatatctgacttcagtggaggccatctcccaatcagtaagagaaacaaaccaacatgacatcagaacaaaccaaccgacaccagcagttttgagttttatggaaatgcaggggtatggtgctgaatagacaaacacttaggaacagatacaatttaacagcagttctcacctactgccctacaccattctcacctgactgtcccggcaccactcatgtgagtaaaaccctctagtcattaatatccttcagtccatgcactcattctcaactagaagtgaggaactgcccttgatacaaggccacttttctcctcagcttatattttctgtaataagggaaaaaatacaacaagaagatcaaaggcataggaatggaaaagcacactgtatgtcatgagagcatgaacagtccattgggattaaaacacaagaggggttaagactggagaggtgggtttggacctttgagcttgaggagttcactgaactcaaagacaatggggtaccattgtaggtgactttgacagtaagctggcagctgtctggaaggactggggctggttccaaggatgacaaaggcagtggtgtatggactacacaaggaagagatgacttgtgatggtgatggtagggaaagaataaacaggtatgagaaacaatatacaaaatctctaagacttggcaacagcgcatacaaataggatgaagtaggggtcaaagacagctgtggggctccaaatccgggagaacagaaagaatgccggtaccgagtgacagatcgcgtctctgggtatattaggtttaggaaaccagcagctcctaagaggtctaagaatctgggttgaataagaaaatctacagatgttatcatggaagtaattcagagaaatgttttagctgatgttactagagttaataagtctcacaacagtaaaatgtagaggaaataaaggactaaaattaatccacatcaattaatatttttgaaaaaaatgtgaactgagaagcactaactttggagcaatgttcacacttgggtgtcagaagaggagtaaaaagtgaaaaataaaaaaattaaagtgttagaaaagtcaaaagaaaaaggatgaagagagtttcaagtagtagggatattggcataaaaagattagagaaggataaactaagagaaggttcctggttttggagaaagatcatgggtgcctgttcagagagcagtacctataggaagtaagagaagtagaaatcaatttaaaagggattaagaaataattgggttaagaggtagtagctggagaacatctagattattcttctaatctctccctctcacacgtcctctctctctctcttccattcccttctcctgtctttaaaagaaggagagacctgaatgctttcgttggcagaggaggaactaaggaaaaaagagactgaaggtgcaatggaggtagaagactatcaactaaacgagtctaaaaggaaacaggatgctaagtggacagggagtacttactctgagttggattcaaggataaaggaggagggtaaattgagattgtgtgtcagagagtagagaggtaggagatactcatagtgaatggcaggtcagtcttctgcagatagcggatgagatcagaggcttcaggtaaggggtcacacctgaccattaatttctaactagaaaggtatttaaaaaattggaaaaatgcaggagacataagagtgacaaaatattttgggttccttttagcactggtgttctgtaaccctaatactggtccctcagagaactgatattcaagtttaaaaatgttaacactaatgttttatatttataaagggctttacattgatctttcacatctgatttttttataatagcactgaaagaagcagagtaggtataaagcatttctactttatagatgaggaaactgaagcataaagatattatcttccaacaaggagaacactatacccatctcataggacctccataaaatgaactgttttcaaagccatatattcaaggtaccccaaggtcccattttcacgctcaatatctctaaaacacattgtccaaatgaaagaaaaggttgagagagtaaaagtatagctttagctgggctgcagacttaaggtatatgaatttttagcactaacatactgtcatgctaaattaaggtaaaacacccaccatctgcctccattactcataatttagagtggaaaccacaacatggtacaagaagaacttttctacaattatagtgtggtccattattagaaaactggcacacgtgcaattgcatgctatgtttcaaatcactcagaaagaaataaaaagaaaaaaaaatagttatgatggcttcaaggtggagaatacaaattaaaacaaacaatcctataatctgcctgttaaagacaggaaaggcattacaacatatagaaaatgaactatataggcaaaacacatagacacaaaactatcaacaatgtgaataaaatctgaatttctcacgagtcttggatcactgcattactttgaaatttcataatgatgttctacagtaaaatattttcaaccactaagcaattttatctgatcactgaaagtgacagagaagaaataaactgaacctctggcctggggcacctctgtgagattctaatgtccaattaaagtctgcaatttttcaacaaaacttcattagaataactcacttgtacccactggacaactcttaatttcttccttggttattttggaaaaaactcagtttctaaagctcttttattttgaataaaatcttaagatcattttgtaatttaatataagtaggaaatgagaggatatccaactcactgagtagtaaatttataagaggccagattaataaacctaaaaatctctaagattttatgtgaatttttgaaaaataaaatcccatgttatatactacatacagacataaattttaaatataaattcaggtttaaaataggtttttctataattaagaatatttaaagacagacaaatactagtcaatgtttaaagcacatttcttctttttcaaaaatatggttattctttaacaataagtctttgatggaggaggacaattattaccttgatgattaatttattttcatacttgcctactaaaatgatttattcaaaaaattcatgttactagaacaaataaatgaaaaaaatagtgcatttaaaaaagctgaattcaataaaaaggtgtgatcatattttcaacatatggaataatacatttattcataaaaaccactgcatttgaaactgagcaccaccacgatccatttataggatgggaataataattaaaaatcaaaaggatacgtattaagtctgaattttgtattaaaaactacattttccaattttttttttgctgctagcagacaaggtttagtgctacagatactgttctaaaaaatcattaattgctcttttttttcagccgcacagtgcagcatgcaggaccttagttccctgatcggggatcaaacccaggcttcctgcagtggaagcttggagtcttaaccactggtccaccagagaagtccctataatcattctattgccacaagtggttcttgcatttgtttttaaatatgttactgcatttttattaattattaaagaatttatactctttaattaaacctttaaaaattattatccaaaatgcctgatatatttttaaaaagtatattagtcttaatttcttatgaagcatgtacatttatatttctttgcgcaacactacttctgtgagggaatagtactgagtaaagaggaagtcaaagtcccctctacttcccatctggcaaaagcttcccttgtcacatcacagccaagaaacaaaaggtcatactcataacactgaggtctctaactgtggttggaaaatgtgaagttttagttctaacttctctgcagagttgagttatgagggaagtaataattacaaaaaaaaaaaaaaatcaaaataaaatcacaggtgtggatgaacgaagatggtgttttagttgtcagtgacgtattaaattccttccctgctttcttgattttcaacaaaacaaatttttagaaatatttattcataattgtgaaaaggctgaagaatatttactttctgttataaaaatgtataatctcttaccttagtaacttttctggattcagattcactttcagattctgattctgattcagaatccgaagaactctcttctattgaactagattcaccactggaagactctgaagttttagagttttctttttccttatccacatctttagaatcactaatcagaataataaaatttgaaatattagatacttacattaaaaagtagtttgaaaaatcaaatgacaagtgttacaatttttccattttgcatatgaatcaaaatctttattagagaagtatatttcactgagaaccatttctttttagtgtatagacagtaaaaatggttttaaatttccaaaacatgttaatgaaataataataaagacagtattatctataactaaatgaatcagaatccattcaaaactaaaccatatcacacacacttcaagtgcaaaagataataaaataagactaaatgacataagtagaaaataataaaatgtttgatttactaggactacacattaggtgctaacaacttcagaaatacttaggcagattttaaagtaccatctcaaaatactcattaaaaatttaaatacttataatctacttttgctaatacagacttgcattttatagattattctgcccaagaaaatgatttacatatgttcccaaatatgcccctgtaacatatacgagaaaacatcaaccagttcaaaagagaattcttctaatgtactaaattttactaaaaatgtaagataatcagataaatactaaagttttaaaataccaaatgatcaaacctaactgctgatgttcattttgttcactcattcccttatttaacaaatatttactgactgccctccatgagctggcactatgttaggtactaagagtaatagtggttagtaagatacaggtatctccatactgctcctttttaaagtctacagtcagtccattgcaagatacagagaagttaaactggcagtgacaagaaagcatggtaaacaataaataacaaagtatatactgtgtcctgagaatacctgaaggagtatctaaacaaaacagatcaagactgggacccttcctagaggaagagacacatgagttgaaagagaggaataaggcaggaagaagggaaggggaaaaggtctccagaaagagatcacacacggtgttccctcaggggaaaagagatagcttggaatcttttttattttctcaaatttgagggtctaacttctctttatcatatgtgtatatacgtgtatattgttttaaaaatccaccttgtgccaggtagtataaggcaattcataaacaattatctaattcagatgttttaacacgttattcccaggtggcgctactggtaaagaacccacaggccagtgtaggaaagttaagagacgtgggtttgatccttgggccaggaagatcccgtggtagagggcatggcaacccactctagtttccttgggcttccctggtggctcacgttgtaaagaatctgtctgcagtgcaggagacctgagtttgctccctgggttgggaagatcccctggagaagggcatggcaacccactccagtattcttgtctggagaattccaagaacagaggaacctgcaaggttacagtccacggggtcacaaagagttggatacgactgagtgactaagcagagcacagcagttatgactactaaagggtggttttgaagatacttaaagctccttagctttgaaaaattatcacatagttatactggcaaagttttctaaaaaattataagagtcaagaggaaaaacacctggggagggtaagtggttaggcaactggaagaatcattatttccctgaactgatttttgtgcaggaaatatgtgattgctgtttattaaaaatggagtcatggtaacatctcagagcacatgtaattatatttgatgactaaaaagtatgttttttttcccctcccccaagatggcaatttattatctcccattagtggttaaaacatatacctaaaatataaggtttagaatgtatctgagatttccttttatataacaaaccatttttaaaaattcaaacatgagtttaaaaaagcctgtttctaaaaaaaaataaaaataaaaataaaaaaataatttaaaaaaagcctgtttctgaagaaaaaaataatgaaactaacacaatttatgattataagcttctagcatattgacttttgctatcagaaaagacacttggtgctctgaacaaaactttgccttcctaagacatatgacattcttcacaaactaagtaatcacagatggacatgagtttgagcagactctgggagacagtgaaggacagggaagcctgaagtattgcagtccacggggtcacaaaggtcggacatgacttagtgactgaacagcaacaaatcatagatattctgacattaaactagaagcacagaacctctctctgagaaaaggctactgcaaaccaagcaactggcttgctgcaacaagtgagtgactcggactatacttagcttctagcctttaagataagattttaaaggtaaaagtgttattttattatgcatcactcaattttgatgggtaattattgtttaccttactgcttagagtttcagatgttaacctaatgaaaagaatttactggtaactagctttttaactttgcatgatgaaaagcctgtattaatttaacctacagatttcatttgttctgaacaggaaaaacaatataaatcacttttaaaatcattaaatcctgacttaaattaataaagtcataattagggcattatgctgtgtttgttatggaagtggcagggcgagctgctttaattactgtctgtaataaaaggagcagagagcgtactgcgccccaatcagtgctgtcagccacgactgagctgggctgcaagctcatcaactgagcgggcagcaggcgcccagggaaagggccatcgtgtctgcagaggccactctctgacagcagtggggaaaacagactcagacaatccaaggtattagccccaattactcaaaattttaatgacactttaacacatgataatattgttgataatgggagatcttaaaaagtgctaacacttaaataccttatgaccgtcttccttcacagcccctgactctaatatttggatcataatctttttaatataacattatttagaaaaatcaattgtcttagttacataatggcaaagtgttgaaggatttaattttcactctcagcaaaattgctgcaaaaggtaattaagtgtttcataccaactgcatgatcacttaactcggctttccaaggttacaccaattttcaaaatgtaaccccaagatttgttcaagttcaaaatggaaactgatcattacaagtaggagaataatgtgaattagtattttaaattaatattaaaagacttacagtctgtttgggaaataaacacacactcattttttcactcaatgttagaccaggggaaaagaccgcagaatttttgtgaaggaaatagctcaccctttccctctggcttcggcatgcttggccgctcttccgctctcggcctccgactcacttccactctcacccgagtcctcaccgctgtccccactgtggtcttcttcctcgtcttccccactttcacttccagacgcactctctgaaaaaaaaaaaaaaaaaacaaaaaccagatgctctttgatttatagccacttaataaatacaagggatagaagcaagtatcaacattcatcacaaatgaaatgggatgctgaattttcacgtagtggaccccactggatccacagtgtctgtatctgctgtctggtcactcagacctccagaaccctgcagcagagtgagcacagtggggctccaatacccagagaaggaacagaaaagatcaaccaagtaaaacaatgtgagcatttcttgcttcccaaacccatacatgtcttagctacagcaaaactttttatttaaagactgattatgagggtgactcatcagaaaaggccctgattatggaaagagtgaaggcaggaggacaaggggaggacatagggagagatggttggatggcattgctgactcaatggacatgagtttgagcaagctccaggagatggtaaaggacagggaagtctggcatgctgcagtccatggggtcccaaagagtcagacatgactgagcgactgaacaacaatgaaggtgatgtaagaataaagaaataattttatttcctctacttataaagggaaattttatttagagaaacagaagggattactgaatcttaggaacaaattttgagagggaaaagagctgttcaaatcatcttcaaaaattccttaattcaaaggcaacaaagcaaaatcactaatcactagtacttgttttagctagtgtaagactcttctgtaagtgaaagaaatgataaagttacactgaggaactacacagtgaaaacttttatgtataaattatggcatactagggcttactgaagaagtgaagtgaagtaactcagtcgtgtccgactctttgtgaccccgtggactgtagcctaccaggctcctccctccgtgggactctccaggcacgagtactggagtgggctgccatttccttctccaggggatcttcctgacccagggatcgaacctaggtctcccgcattgcaggcagatgctttcacctctgagccatcagggaagccccatatacagcatgtttttgtgtattttaaacaggaagcataattttttggtagttgaaatgatgacacatgcagagttgtatcctggataagaggacacactgttttcctagcctatgatctatctgatgacatgtcctcagggaggaacatgttgctgttgttcagtcactcagctgtatctgactctttgtgactccatgggctgcagctgccaggcttccctgtccttcaccaactcccagagcttgcaaaaactcacgtccgttgagtcgatgatgccatccaaccattctggcctatgatctatctgatgaagtgtccccagggaagaacataacctctagttaaaatagtattctaacaggtaaatagtagtatctactctataaagattaattcatgtatcacacagcaaaaagctaggaatgcctatattcttttggaagcaacagttagaactggacatgaaacaacagattggttccaaataggaaaaggagtacgtcaaggctgtatattgtcaccctgcttatttaacttatatgcagagtacatcatgagaaacactgggctggaagaagcacaagctggaatcaagattgctgggagaaatatcaataacctcagatatgcagatgacaccactcttatggcagaaagtgaagaggaactaaaaagcctcttgatgaaagtgaaagaggagagtgaaaaagttggcttaaagctcaacattcagaaaactaagatcatggcatctggtcccatcacttcatgggaaacagatggggaaacagcagaaacagtgtcagactttattttgggggggctccaaaatcactgcagatggtgactgcagccatgaaattaaaagacgcttactccttggaaggaaagtcatgaccaacctagatagcatactgagaagcagagacattactttgccaacaaatgtccgtctagtcaaggctatggtttttccagtggtcatgtatggatgtgagagttggactgtgaagaaggctgagcactgaagaattgatgcttttgaactgtggtgttggagaagactcttgagggtcccctggactgcaaggagatccaaccagtccattctaaaggagatctgcctgggtgttctttggaaggaatgatgccaaagctgaaactccagtactctggccacctcatgcgaagagctgactcattggaaaagactctgatgctgggagggaatgggggcaggaggagaaggggacgacagaggatgagatggctggatggcatccctgactcgatggacgtgagtctgagtgaactccgggagttggtaatggacagggaggcctggcgtgctgcgattcatggggttgcagagttggacactactgagcgactgaactgaactgaactgaactgaactgagccatcaaggaaagtcccatagtgactttttacaaagaccaaaatttattttacccaaactttagaaaacaaaactgttgattaagggtgttttgaatttgttgtgaagtcaaagttaagcacacatacatgttaacttagataactggcttatgctgttacttttcatgtttttatgggagttcaaaacaaatctggatccagttcatttcaggcatcatttatttaaattttcaagttagaaaaatccttgaggaaatttgtttatcttcaagaagacgtgttcactggaaaaaaactggtatcttctaatgggaaaagttttctctttcttctggtagctagaagggaactcttactatccctactatacttcagataatgccatgaaaagccataatgttactggaatatttcaaatacatactgaaaaaggttagactctaaatagaacatgagcttgtgaataaatgggatggaaacaaatatctctaagagacactcttaactacacaacatatctttctcaatggtctatatcattcctgaaattccgtatttttagcattaactgtttggattgaagtaattttccccatttttcagcttattacttcagaaaataatgcaccacagactaatttgtcaaatactgaaaacaaaggcttaccaaatgtaaatttatgtctttcaacacgttaatgaacaccccaggcattgggggttagaattcagaaaagcatgaactcttttttcaattctatcgttttttagttatgggtctaagaggcaatgtcaaaaaaaaaaagcggttagaaattactttgaaaacttacatatcatagtaactttgatatgtaaatgaaaggaactgtttcagtcgtatgaacttcacctaaacctgctggctgaatattatgctccgggcctcactggtctataggaagcacggctgataaaccatggtgaataaggtttcccaatgaattaaagacccaccactgtcactgctgctctcagaagagtcctcttcctcctcagattcggagtaaaatttcttatcaggattctctttctttgcttttcctgctggggtccattcttttgcctgattttaaaaaagtaaaaatgtaaatatcaaggaattctcattaagggatctagtcttcaggcagacttaatcattcggaatactctgtgaaaccagaaggaagtttaaagcctcagtagaaaaggcaacactgagaagtcttgattcccactacccctaagtagagaaacataaactctcactcagaacctattgttttagatccacaaccttatacataacatataattttaaatacttttgtattcattggcctatagaagatttaagctaaagtaagacagtatagaagagagaagggcaattagaggcagaaggagtaagagcagtaagaaatccaacttcacagcttgatgttcggtgtgctgtgcttagttgctcagtcacgtctgtctgactctttgtgaccccatggactgtagcccgccaggctcctctgtctgtggggattctccaggcaagaatactggaatgggttgccatgccctcctccaggggatcttcccaatccagggattgaacccaggtctcatgcatcgcaggcggcttctttatcatctgagccaccagggaagcccaagaatataggagtgggtagccgatcccttctccaggggatcttcccaacccagggatcaaaccagggtctccccagcactgcaggtggaatctttatcagctgagttaccttgatgctgaggttttttaaaaaaaataaaataatcaaaacatttagtgtaggcaacaaatagcctgtaccatctcaacagcctgaaccctggggtaattctctgtgtgtttgtcatatcctagatatctaatccatcaagaaagcctataggccccttggtcctttaccaccgtactcagagccatctctctctctctctcggatcaccacaatagtctctgactggctatcttgtgtctagttccatctctcacccccactccaagttggctcaaaacagcagctagaaagattttattaattccaatcaagcccctctttctttgaaaaggtctgcaaaggcttcccattcacttagaacaaacgaagcccttacgataaaaacctgtcagccctacctgactcctgcagctgctctccctcctgcccacgtccttccagccactcatcacagtggcttccaacaccccagacgtgctcctccttgaggcccttctccaaagctgctcctacttccagcaccctcaccccagacgatcgcatggctcatttcctcacttctttcaagactctctacaagtgccacctcagggaggaccgccctactgaaaacttcaaccccccgtggagctgatcttacttccctggtggctcagatggtaaagtgtctgcctgcaatatgggagacccaggttcgatccctgggttgggaagatctcccggagaaagaaatggcaacccactccagtattcctgcctggagaatcccagggatggagcagcctttgcactaattttttttttctttgttttttggccacagcacttattattttctaatatactactgtatacaatttacatatttattgtaattgtcagtctatccctgcaagaacatcagcatctggagatcagagatgtttgaatattttgtacactgatatatcttaaatgtgtctgccacaaaaactattagttgggtgacagacccttaaaaactttaatacagtgtattgaagtaaaataaattattttcataactgtgactttgattcattaagaataaattaaatcatgcttcatacactctcttttaaagggcaaggaaatgtgtattttttaaaaggtcaagaacagttaagacgcatttatttatcacacttcagagttttcactatgtgccagcctgctagggccatctgttgtaaagaaatttacagtaagactgaggttcttactcaagaatggttctcagcactggatatctgtcagaatcacctgaaaatactttaaaaaaatattaatatcaataataaaaatactaatgctaaaaatgctaatgcttgggacccacttcccaagattctgattggtctggtacaggtctgacacatctgttttaagatctccatatgaatatagtataaagctaggttggaaaaccactgcgtagagggcttatgggcttaagatatgctgcttacaaaggtaagcttcagtaatctggaaaattactatctggacaaaaataaaaaaatgagcaaaagttactcaaatatatttgagtaagatactaacataagatcaacaatactgctttgtatgctctgtcctccagatatgaataaagacagtactctataaacaaagttctcctatatttaataaacagtaaagttcatattttttcttaaatccaaatacatttttctgcaagctagtaaaatgtgtgtcaggtcaatttatgaaaaaaaaaattatttagttagactatggctttccggacaagactaagtcatcatataaggaaaatcaggcgcctatgctcagaggggcataatattttgacagggccatggattctctattcatggagtttaaggttttaaagggtaaagactaaaaagtattttaattttttttatggtctgttatgactatgataactgtatcattcttagcaaaggaaataaaaaggtaaagagaagaggaaaaaaaataacagcactaatttgaaagtttcaatataagataaaatattgacagtagatgtgtttataaagcaaaatacccttgatatgcaaaactgagagaaaaggatcttctagaagcaagtaaaagcaaaaattgcaaagaatcttgaaaatttactagtggcataatatatatagtagctaatatcccggaaatggaaacgtgtgatgcagtgacttctagtgtcagtgtgactaggttccatattattttgattaaagtattagactgtctaaacttaggctgttattcttgctaagttagatttcatagtaataagacatgaccctgtaagatgacagtaagactagggtcacacacatattatgtgcataaatacagtgatgcgactttagacagggatgaggcagaatgaaaggcaagaaagattgtgtgaacactactttctacaatactgcagccaaatttgataataaaactatatatgctgtttttatatttaattaagtctttatagtataatttcaagtcaatgtgtccagagacaagcagattgaaactgttttctacatggcatcaatggagagtgagttttttccaaccaagttccatcagttataattattctccataataagttaccaattattaatttccacaatgcagtcagcaaaatgaaaaaagaaatcaatttgtccctgttcaattggacaggtgaaatgaatataagaaaacaggttattcaagtactgtccctataggtagttaatgcttagaagagcatgagaaaatggaagaagccagccaaacaaccaatctatcagccaatataagaacactgctgagaccaaattaaattgcatggcattgctatcaatttctgagatgatagttttatttaacattttttttccttttttttttttgtggattggggcagcaaggaggagggataagagcagaagtaggggtaggataaaaggatgattctacttgggccaaaacattaagtacctaataatgaaaagggacagaaccatgaaaacaacaaacaggcaaaagaaattaggagagagtattacttacaacaaagaacattctctttgtattctagtatctgaccaaatgtttcataaataagccaatctttttgaagaatacttaagagtagtatgtatatttggggagaaatcaccaaacttagttgcaaggagaaacatggaacttgttaagttttatatttttaaaaaaaatcatctctaaatagagataatttgtcacaacctgaaaacagtggtgttaataaatactaaggacagtctagaattgcaacaagctcaagcttcctctcatcatgttacataataaaatgcagtaagagtgggaacagtggactcagatatgaagtggtatcccaattctattacttactagctatggggacctgggcaatttacttaggttctctgaaccttggtttcgtcatctgcaaaacgggaataacaacaaccatcacttataataattatgaggcttaaacaagtaatgattataaaatattatcaaagaacactaccagggttagttactgattattattgccctggccacacttcaaagccagataagtttgagtaggtaagagaaacatacttttcaaagcagccaaattaaatggctgtgccccagatatttcctggcagtctagcggttaggacttggcactttcactgttgtggcccacgtttaatctctggtcagggaactaagaccctacaaggtgcaaagtgtgggtacggaattcttctacttaaaggaagacagttttttccccattgtatagggaaaagccagtaggcaagaagattaactgactttctcataggaattataacgactagttacctgaatcctagttcaatatatgtgctatactggaaaggcacccaggatgtaatacataatttttttttaattaattctatttaaaaaaatatcagatacatttcacataatcaatctctaaagacaatcagaagacccctctccttatttttcttgtttatataagaaagaaagagataatactaggaaagaacatcaattctcttattttagtgggcagcacgttataaagacctaggaaaagagtatttatacagagacttttttttttaatgtgaagcaatatagtattcattaattgtgaccttgttcaaggatatttttggtacataatgcttcctatttatatttggcttcatgtgaaaaaggttcctcagaaaagccaaaagaacactttgtatggtttctggaagagatagcaaaactgatttggagaatattgacaggaagcttatgagtctctaaactaagtgggaaaagctcaactccatgaaactaaatactttagaaattgaatctgcacagctacaaatgcagtctcacaaatgtgggtggcactgacgcagagaatccaattctccatttccgtgaaaaaaaggaacagtacatgtacaatgacataggaatactacaatatttagttcccagagcagcaagatatgtctaacacattatctttagaaataccagaacaattttcagttttcaacccccccccaaaaagcttttatacaaaacagcagctatcctagaatctcctactgcttgacaaaattaatttcagaaaggtcaacttaccaactctattacttctacatttcgaactgatgggtcaggcgccacctctggccaattagataattccaggtacccagttgctttggtgttgagagtgtgagataaagtgccaagctggaaatgatccctatctattaaaataaaggaaaatataaaataaacaatctgagctgcatatgacagagaacaatcctaatcagagctcaaggtaattggcatattacctcaaatgtcaaggaataaatataaactaggaaactcttcagaggtcaaaaaaactgatttcagtccatggattacaataatctccccgataatggtcaataaaaaagctaatcagtcagtgtgtttagaggtgttgctctgatatgtagcttctctaaaaattactttactgtgaatattaagaatgacagcacagttaaacaatccatatacatgtcttgccaccaacacattcagaattttaatagttttactacaaaactgaactgctttttatccctttacagcaattaaataagaaacaatatgaaaaccaaagtatataatcatttgattcccactgtaatggctacttgtgaaactgataaattactccttttaaaaagctggggaaaataagtcaatttccatctctgaaaagcaaacaaatataaaggaatacttctatgaaataattctttccagaaaagcttatgttagtgtacacagaatatttaataactcactattaaggtgaattatatatcccttattaaacaaaggtatctatttaaaccagaaatgaagtcaatgtctgcaaacacaacacagcttttatctattgttcagtcaaatcatttggtaagaataaacgtcagaagactgaaattatttaggtaaataaggcctataaaaacataaacttgaactaatataaagcttgtttcggagaagagatgaacgaacggaaagcacactttttgtacttatatatttatacacactaatcacatattttctaagagatatattttaaacatgttagaaatgggatataacatcataatttttaagataacatataatattctgtaggtatattctgataataatacctttaaaaggagattcaagcagtggtgcgggtttctgtgccaggaatatttttttggcatatttacttaaagctccactcttctcattcggaacaataagctgcctaataaatcttgtacgatctctgatgtcgtagttttgatcatacttgccgagatttaatatgtactgggtaagcaattttgtctgttggaaaaaaaccgaacaagatgagaatacagttatttatgattattgataactctggataaacatatttaaagaggtaataaaaatgaatggttatgtcaaacaaatgttgttccatagggaatatgcatttctaacactgcaaatggaattctgaagccaaagcacatgtcctcttcagtattggggaggtgaatgctgagtactgagaagcagccatgtgctagattattaaactgctgaagtggaaagaaaggcatcattaaaaaaataatcatatatggcaaacccgctgaagggtctacgtgagaataatgagtgtggaaatacaactaaaaacatggcactcaagacttaatcggaaaaatatgcaggacatcaaaacatcagagagtattagggggctggaaagctgcttctcctgaggtgtgttttatgaagagatactgtccctggcataagcagtgtctgcactctgactgcactcagttactttaccctgaattatgacccattaaagcagacacatgaatcactgaactggattactgcaaattatttgcagtgcatttagctgttactttttcataaaagcaagctgctgatgccctctaaaaactaggataaaagactccttccatttttttccccatattgcttatggcctctagtaatattggtcatttatttatttatgttagggaacaacttattatagtagcttttacactctaataagatttcctaagtcaatttctgactgtactacattaacatatattgagataattttaataataattaaaccaaaattgaaatgttaacaaaataggtttgtattttcaactcattactttattgaaaaagtgtaattttaatttagaaggttacacatatacaatcctaactataaacaggattcataatacatggaaaaaataaacatttgtattagaacattttatagacattagaaatagattaaaaacaataaaatccatcaagtcaggtagagctaaagatagttctataccaataagtcacgatacaggaatggtgtggcaaactcttttacaatattaattcattaagataattgatttggatagaaagcaaccttctttcagtaacaatctatttaaaaaccattaacctagttttactaaagtagaactacaaaaaatacagatgaaaaatgttaatagagctattctaaatttggttaacaactgctattcactaattactagactaggttggttcgacgacacataagaaaatttctatgattgattttttaaggacaatcagcaaaacagtcaccaagtgaataacccaggtcaacccaaggtacactggactgtgtaatcaacttgctgagataacctggaaaatacatcctactgttaagtttcttcaactgtagtgagaattcataactaagttaactctgtaaagtatatttgaatgttgggatttagaatatgcaactagaataattcagataaaaaagtctattcattgcagcactttttaaagctagtggagtgattcatctcgcttttatttctagtctctgaaattaatttttaggaagttaattatttgaaatattaactgtatttaaagtgagatagaaaattttaagttattaagattatgtaatttctatactatgcatttattgagtataaaacttgctttaatatatgggtgggttatgaaataattatagcaagtgtattttcaaaattaaaattctaaaagataaaaacatatccaggccccatgatacattaaaaacataaacagaataattaatttactcacatacctctttattcacataccttaatcaatttcttagctctatctctaaaaccaagtcattggtatttatctaaagaatgcaattttatatgtcttcaaaatggaattatcttcaaaatggaactttatgatcactaattatgaaagtattgacatttgcaacttattctttgctatagaacttaatatttttaatggagaaagtaccctctttacagtttgaatgatccaataagcatagaaaaaattctgttgaataaaggacattcttaatgctttcatgttaaaatttgtaaatatttcaagcctagatatttaaattttttccctccaacaaaattatctttatgagatgaaacttttgaataattctctatagtttaatatttcatcaaatttagctactgcaaaatcaactgccttctcaatttcatttcattctaatataaaatataaacttaaccaactaaaatagtagctccatcaaaaaagtcttcatcatagctgaaatactgcaaatgaaagaacttctacaattattagctcttaccacttaatttgctcaattcttcctttgtttttatcgggatgtatttcaatgtcattctctttgcaagatttgtttctaagaattgctattttgctaaagttttcaaaagcttaaggtttttgaaactctacctggtaaacattttaaaggtttccaaatgattttgaatcaaaatctaaccaacacacaaaaatctcacttaatctactccccatgcacccacctacctaatccaggcaaaaaagccagtatatgacacaggctaatttacaatgtagtttttcacaatatcacatttctaaaatcctgctggtcacatgcagcaaaaactgagtatgagagtgtgtgctgtcatgctgaagtatgctttttcaatatcagcttcatcacaagaattctgtagtttagttaaaccacacatatcaagtatcagtatatttgaccattatagttttatttcaattggtaaaataagcagagtgagtttgcaggcaccacaaccaatgcccaaaatatttctgttccatagttttcttaatttaataagaatgttgcttttaccatgacaacatttgttcagtgaaagccatgttggggcttttaaatttacaatagcattttacagtgattttgacagaataaactttcaaaagctttactcagattccatttacactgacagaagaaatgtacaaaagctttgagtaaaaatggtctattactggaattaattgttttttatttgaaaaccagcagcatcatttgggtcctttttctgctaatggagccagtacaataactgtcattgcttcattcctcatatgtgcaaaagaaaacttgtaataaaaataaacaaaactaaattttaaaagttacttgatctatatgagatcatgtctcacagaaagggatgtaaacatatttggcacctgcatacattaaatcgtcaccctgaggcccagacttcctaaatatcttccagttttgaaaacagatgctgaccctgttttagcagatttatcttatcttcagtttgttgtggggatagtggtatcactatgatttttgtggtagatggtacatgctgatgaacatttctgtgcaggttaaataatgatacagaaattctctacttcattcttcattaaatatatacttcaagttttcagaatttattgctgctggaattataacaacaacaaaaaaggaactgccaaataataaaataaataggttttagatttacagtacacagtaaatgacaaaactactgtagcaagagtgccctgaccactctcttgaatagtttatagcaagattgttctgtctctatctcctgcacatatttcgtccacaaccaacccgtaagtccccatgttttcctcttactccagccactgacagctgggagcttaatgctttgcacaggctgtgacacaacatgctggttaccatcaagttaccattagataaaacacttcaacacttatgtcaccaccaatggaaaaaagagggacttgccttatcagggcacgctttgttttctcagtacacatcctacatgttgctctaaacaggaaaggttagtcatgctatatctcaaaaaggttgggaaaagaaagacaaagtctttccatttaaatgtttctcatttttaaatgaaatttctgttcactacacttgtgtttcacaggccactagacaaaaccatggcaaaggttagaagtacaccatggaaacttacaaacttactctgtcttattttaatgcaactctccttggacagaaaggagatcaaaccagtcaatcctaaaggaaatcaaccctgaatatgcattcattggaaggactgatgctgaagctccagtgattcggccacctgatacgaagagcctactcactgatgctgagaaagactgagggcaaaagaagaagggagtggcaggatgagatggttagatagcaccactgactcaatggacataagttgagcaaactctgggagacagtgaagtacagggaagcctggtgtgctgcagtccatacggttgcaaagagtcggacacaacttagcgactgaacaataacaacaacagcttcaaaaaagaggaaaaccctgggataaagcctaaactggatgggacactgaaacaacagataaaaatcagatctgtcctgggcaacagtaacaaagaaaacagacacgatcacataaacaatcacggcatttcaatatggccaaaggctcaatcaaaaccagactggacattcaacagtacattcaaatgggttttataaaaaaaaaaatcatacaagatgaagagaatattataatgtaccataaatgacagacatattcaatagcatacatataccattgtattcaatttttatgccatattattttcctgtttaaggaatcatctctggggaaaaaaaattggggggaatgctttgtaaacatgaagatatccaatattctaaaaaaacttctcaaaacatgggcatcgtatttctacctaaatactcttgacaagtaataaactggtaaaaactatttgctcaacaatagccttcttcaatggagaaggcaatggccacccacttcagtactcttggcctggaaaatcccatggacggaggagcctggaaggctgtagtccatggggtctcgaagggtcggacacgactgagcgacttcactttcacttttcactttcatgcattggagaaggaaatggcaacccactccagtgttcttgcctggagaatcccagggatgggggagcctggtgggctgccgtctaaggggtcgcacagagtcggacacgactgaagcgacttagcagcagcagcagccttcttcaaatattacaggtcaacacaaaataatgaaaaagttatcttatagtcctaacatcagcttacacacaaaataatgaaaaagttatcttatagtcctaacatcagcttacacatatatttgtttatggaatgttaaaaaacacacaggactcagcatttaaaattggttccacatggttgtaacttttaaacagaaggatactagcaaatgtgtttggtaaatttaggagaactacacagaattcttaacatatatcagaggcaaatgtaagcagcactagtcttctagttaatcaatttcatcattttacgactagaactttacattttttttaattaaaaaattttattaaatgactctttaaattctatatggctttacaattttcaaaagtttcacagagatgatttcagaaaatcctgtaacaacctttccccccacctctatgtcaccgctcccccttccctctcctcactagtaaccagcagttatactctctatctgtgaatttacttcttttttgttttattcactagtttgttgtactttttagattctacatataagtgatatcacacagtatttgtcattctctgtcttacttcattaacataatgctatccaagtccatgcatgttgttgcaaatagcaaaaattttattctcttttatggctgagtagtattccattatccatggatggagcagcctggtgggctacagtccatagggtggcaaagagtcagacatgactgaagcaactgaatgagcgagtattccagtacagacatatatcacatgtgtgtgtgtatatatatgtgtgtatgtatatatatacacacacacacacaaatatataatatacactatacagtatatgtatatgtactatataccatatatgtgtttcattatactgttttatctatatctagccctcctccctccctgtctccctctatatatatgtatatcacatctttattcattcattggttgatagatacttaggttccttccataacttgccaattgtcaagtaatgctgttatgaacattggggtacacgtatcttgtattttgtgtgtgtgtgtgtgtatcttttgattagtgctttttatatttttttgtcagatatcaacccaggatttgaattgctgggtcacatgatagttctatttttagtttttctgagaaatctccatactgtttttcaccatgtctacatgaatttaccttcccaccaacagtgtataaggatttccttttctccagatccttgccaatatttgttattggtgttctctttgagtacagccattctaacaggtgtgaggtgctatctcattgtggttttcatccagatttccctaatgcctagcagttctgagtatcttttcatgtgcctgttggtcacctgcatttcctcaatgggaaaatgtttattcagttcttccgctcattttccaatcaagttgtttgcttttttgatatcaaattgtatgaggcgtttatatatgttggatattaatcccttattgatcacatcatttgcaaatatcttcttttcagtggactgtcttttcattttgttgatggtttcctttgctgtgcaaaagcttttaagcttcagttcagttcagtcgctcagttgtgtccgactctttgcgaccccatgaatcgcagcatgccaggcctccctgtccatcaccaactcccggagttcactcaaactcacgtccattgagtcagtgatgccatccagccatctcatcctctgtcgtccccttctcctcctgtccccaatccctcccagcatcagagtcttttccaatgagtcaactcttcgcatcaggtggccaaagtactggagtttcagcttcagcatcattccttccaaagaacaccaggactgatctcctttagaatagactggctggatttccttgcagtccaagggactcgcaagagtcttctccaacaccacagttcagaagcatcaattcttcagcgctcagccttcttcacagtccaactctcacatccatacatgaccactggaaaaaccatagccttgactaaatggacctttgttggcaaagtaatgtctctgcttttgaatatgctatctaggttggtcataactttccttccaaggagtaagcgtcttttaatttcatggctgcaatcaccatctgcagtgattttggagcccccccaaaataaagtctgacactgtttccactgtttccccatctatttcccatgaagtgatgggtccagatgccatgatcttcattttctgaatgttgagctttaagccaacttcttcactctcctctttcactttcatcaagaggctctttagtttctctttgctttctgccataagggtggtgtcatctgcatatctgaggttactgatatttctcccagcaatcttgattctagctgtgcttcttccagcccagcgtttctcatgatttactcttaagtttaattaggtccaatttgtttatttttgtttttgtttcctttgctttaggagatggatccaaataaatattgtgacttatgtcaaagagtgccctatgtttttctctaggagttttatagtatccagtcttacatttaggtctttaacccattttgagtttatttttgtatacagtgatagagaacattctaatttcattcttttacatatagttgtctagctttcccagcaccacttactgaagagtctatcttttcttcattgtatattcttacctcttttgtcatagatgaattgactgtaagtgtgtggggtttttttctgagctctttattctgttccactgacttatatgtctgtttttgtgacagaaccatactgtcttgattatggtaactttctaatacaatctgaagattccctggagaagggaaaggctacccactccagtattctggcttggagagttccacagactgtgtagtccctgggatcgcaaagagtcggacacgactgagtatctttcactttcacatacaatctgaagtcaagaagtatgattccctcagctctgttctttctcaagattgcttcggctatctggaatttgtttccatacaaattctggagttactcattctagttctgtgaaaaacaccattggtattttgctaaggattgcactgtatcagaagattgccttgggtagtatggtcattttaacaaaagtaattcttccaatcaaagaacatggtatatctttccttttgtttgtgacatcttccatttctttcaccagtgtctaatagttttccaagtacaggtctttcatctccttaggtggtctttcatctcctttcatctcctaggtatttcattctttttaatcagacggtaaatgggactgtttccttaatttctcttcctcatagttcactgatagtatacagaaaaccagattttaaaaaattttacagtatacagattttttttgtcaacttgagtgttttacctttatatgttttatcttgactttttcaatgccaagaaaatttatccaagaaagggtaaaaacgtcactgcatagagcctgtgtcatcaaagaattttttgagtgctgtatctctggttctagttttgcaataattcctatggtttgtgcatttctataaagcataatgagttttaggaatatatatgttgaattagaaataactgaccatattattgtaactcccatcttacatattaggaaactaagtcttacgtagactgtataatcagtccaaaatcatgtagctagtaagtggtaaaacagtatttgaagtcagacagtctaatattggagcctgtacttttgattaccatctgacttccagtaattgacattaaatagctctaaggtagtcatcacataccaactgctttctaaatttccactgaaagagcccaaagtcaggaaattaaagaaagttacagaaaaagttcatctacagtcttaatcataatttttaaaaactatatgaatagctttatatctctataccaaaaaaattaaaatattaaagaatatgtaatactagacaaaatgttgatttttcaggtactatatttttcagttctagaacttccatttatttttttattagtttttatttctctgttaagagttcactttccatctattgtgaacacattttcctttatgtcatcaatcatttataaaagttgcttcaaatttatacctataaacttccacatctgagtcatctataagttggcttctggtttttgttttcttgaaaactggccttattttcctattcttgttcgttattgtgctaaaataaacataaaatttacactgcaaccatttttaagtacacagttcagtgttacgcaaccattactaccattattctccaaaaatttttatgtcttcacaaattgaaattctatacccattaaatagtgattctctgttcgagttcttacattgagtaaattgggatttatcttggacattatgaatgctgcactgtagaaaccctaaactttgctatattttgggttgggttcacagtacagactgtctcttcagtgctgttaaaattgcagttcagtccctttattattaactgtgtggctctaaatccatcatgcatatatgtggtccaggtgtcagccagaggcttggacagaattattcagattttgaagctcctcacactggctctttcctttctagaatcgttccttttcaatatctttggtggtagttttctttttgacgccaccaaaacagcctgcaggatcttagcttcctgacagggtctgaacctgggccctcagcagtgaaagcaaggagtcctaactactggaccaccagggaattccctgtattttctaaaactctgtcctctacttcctcaggcaggaggactctgggtttccttctggagtttcagtctcttatgtgtagtgccaactgaagactgaatttaggatcagacccagaaaagtgtcaatttcccttcagaatcttcccacttttaattactcttcagagacttcaggcagttgtttcctttttgtattttcccagagtttacagttgcccagtaggaatttactgaatactatcaaaagcagactgttgactaagtttcaaaatctcttttacactaaagaaagacatttgaggtattaaagaaatttattattcaattgtttttaggcatacaattcttatatctgctaaaaataaatttagatatcccttataattaaataatgcaataaaaattctgaaaatgctcattgagtgatctaggccacagggaagttggatctacaaatattggggcatcacggcaaatcagtttctgaacattgtggcctggactccctagttgagttttaaagatggctaaaattaacatgtatagaaaatatattttttaacatttataagaattttagtctcatatctagtagattatgaatcatgcaacttaaaaatgctgtctaatggaacttaaacattattctttagtgctaattctcacttacgaattctctaaaactccttgagaaatgagaaactggagaacagaacacaaccttacaggatacctttgttcatctatttttatatttaatcatttaaaaacaatgagttttttttctaaacataactgtttcaccagctggtggtcaagtctattatggttatctagaagtatcattctaaaatacacaatacaacacttcagaagttcagctccaaaaaatgagctcaagaaaaaataaaaacagctgagtacaaactatgttgtcttcaaagtcactgaataaaaagttatggaatatactttacaatttctgaacatagagtactatgctctattattggttatttactgctccaaagaacctttatttagttttgtaagacataactacgtcagtgttaacagaataattttgtattacttttctttgatgataacctataagctagatttatctatagcagccaaaccattgttatgatacgctgtgtttagtagctcagtcgtgtctgactctttgtgaccccatggactgttgccttgccaggctcctctgcccatggggattctccaggcaagaatactggagtgggttaccatgccctccaccatgggatcttcccaacgcagggatcaaacccaggtctcctgcactgcaggcggattctttactgtgtgagcttccagggaagcccactgttccaaaaaggccataaaaatcacatattctaggtatcatggtaacattcacaataccatacgaagagtaaaaacaatgaatttcaggctaaaacagtgtttttatcaataaagaagcaactcaagagcaaacacagttttccccttttactcagttttttaaaaatacctcattgcatgaattaatttacatgacacctggaaatgactaactgattcctttcaaagattgacttaaaatataaagataaaatctaaatcatagaaatatgctcaaaatatctgtgattatttggtcacaaatttgatacacccatcagccaaagctatattaatacaactcacatcacaattaggaatgaagacaacctgaaactatacagcaatgaagttgaggagttacttgagaatttctcattctttttcctttatctaaacagctatttagacaaaggaaaaagaatgagaaagatcctattttatacacagaagtgactctatgcattttatacatacaggctatttctctaatcaacagttccacaaagtcaactgatttaaaaagtgaatattctaaactgcaaacatggtgaattatatcactattaaaaatatttaatggttttcccttcacgtggaggatcaagtcctgcccttgcctacctttcgaaactcagcttaagtttcctgggggcaccacgctgtgtcatgactctgaccccctgctctcctccctccttattctgtatagtaaaccactccttaaaagcccttagtcaggagtcttatcttgactgaaactctgactgacctctctcctcctcctatttcagactttcaataactttctcctctggagttccactgtgtcacaatacactattatagtacttaccatacactatttcatttttttatgtttttctcctcaactagaccagaacatcgtctctttacacaactatcatctaaagtaaaaccttaaagaaacaggcaccgggtaattgttgaatggacagactaatgtataaatggacatagctgcttgatcagagcaaagaagaaagtagattccacataggtagactaacgatcagtctcttacctgtttggagttggttaaatacaattttgctccaagatttaaaatctgcagtttcacaagatcatcttcgctggtgaagcttttagccatcttcctcaaaacatcaggggcaattttaggaactcgttcacagttttctccaattagccaaagaatacttgctctagccacaggaacctaatagtagaagcagataacatagaaatattgcaaacaaaataatcacactctccttaatagtaatatagaaaaggctttaaatattataaaaggttttacatctattaattcatttaacgtatatccaggaagtcctcttatatttacagattttcttcagttaccagaaaatctgattaaaactgatttcataaaggccaaagcaatggtctagaatcttgattctatcagagatctgcaaactcctgggccaaatctgtctagcctagcccgcttgtttatttatcatcgctgctgctcctgtgctgtaattgcagaaggaagagcagttgaaacaagtgggttagtcactcagtatctccaggctcctctgtccatgaaattctccaggcaagaatattggagtgggctgctgttccccataaagttgaaaatatttacttatctatcaatttacaagaaaaatcagctgacctttgctccagggcattggtgcacaactctcaatggctatacaaagcgtccaaggttggtactagagtttgagtaaactccgggagttggtgatggacagggaggcctggagtgctgcagtccatggggttgcaaagaatcggacactactgagcaactaaactgaactgaactgagggctgtaggcttttgttatcagttctaagacagtagttctatgacggggccctggaatccatgctccatgaagcatcacagatgattcttgagacaggtggcttgcaaaccacattttgagaagccatggacaataccgacaaaggaacagaggacccatttaagcccttgattccaaatgaaaacttactgttttctacatatctgtatctacagcactgaaaaaattatcaagatctgcttataaaatcatgaatgctggtctattatttggtcatcaataaaagaaacaggaataagataaacttgcccaatatggcatttttcattatatatttttataaagtacctttccatataatttgtttcttaaaaataaatgctttgctaaaaactggaaaccttccaccagcaccattaagaagaacattttatttagagcatgcaaattacttttattactatttatttgtattctcccttattccaaaaggaatttgaaggggtatgcaaattagtttctgcaaacattttcacctgtatagaaaatatgctttttataataaatgaaaaagccactggctatcattaagaagtagcatcacaagaagaggtaagactctttatgaagtccttttctaatttctcaaataaagtcccaatgttttcattacagtttcacagctgtacacagtatgactgttaaggaagaaagtgagaatggagacctttgcaaagtgagaattttatcacaatatctaccatctcaaattccttcaaaacacccatttcgagaagtaatacattatttagacatcgctaagtcgagttgttcaccagaatgaggtcatcagaaaactttaaaattaagtacacatttttaaataatgtgctaacattaccatctttaaaattaatattagaataagtttagtaagagagaagaaaatcagtatatttacataataattttaagtactaagcaaagtaacagtaaaatactaaatgctattacagatctactcatgtattatgataaaattgatatccttactgtatactgatttttgggaagaaagaggctatttccaatgttccaaaggttacactgcattaaggtcttacttccaatctattactttaaattgggctaaagaatagtaattgagtggtacattaaattttccagtatgaagcaattcaagttgcctaccataatgaaatgtacctctaaataagaatatatgagcaacttcagatttcagttatgccagatttacttttcttaaatattttattatatattgctagtataaaaattagaattctatgacatatcacaatctgttactccactttaatcctttggttatacactttttttttttttcagttaaaaggacaatcccccaaaggtctaagagattattttattcctattcactaatataccaagattaaaataatattcaaatactctaaacagtgtacatacatttaaaatataactctttaaaaaattaagaatcagtaagttctaaatgttcacactgaaaatctcaagatgatagcagtggtgtggtggggccaggataatattcagagagtccagaactaaggtaataaaatttccaagtaacattttaaaaacacagaaaatttctccacaaaaggaagtaatatcagtaagtatactgaaaccaacctttctgtgatgacattaaaaagcttagaaaactgacaaacctaatcttgcacatttggctggaatcagaatcataaaatttttgggttccagccctgccttcccctccctattaaactataagactctcatttgtacattactgatactatgaatctgtggccactattttcaaaggtttgaagcaactgaaaaaacagtacaaaaattagccactttttgctctccacagctaaagccaaactattaacacacatgcacacatataatactttcattatgaacctctacttgtcagtattttcaaagacaaactggactgtaagtgactctgcttgatcctttattctaaatgccctgagcaagtggttaagtgcactttttaaaccttctaccagaaggcagtttccactgccattttaagccattaacctgcttgcaaaaacgaataatctttccaagctgaccatagcagttatagaaagacatccagaaagatttcacagatcactctgtaagcagttcaatttaaaagctattgtgttacaataccagctcactgcacagtgccacagtgtatggtcaaacctgcaaaaacatcaattttatttaaatttgtcaaaggcacaatcagaagacatctaaacaaactgcatacaaatagcaaatctgatccaatattctacatctggactcaatatgcattaacacttaggtgtgaattaagcaggggtggcagggcaagtgcagttaacttgtgaaatggcaggcgttcagttaggcacttgggcaagaagtccataaagcactacttcagtatcactcagcagtctttacgaaataacatctttcagctctccttttttaatataaaatcctcacctgtcccattcaaggtaatatgtaaccctgttagaacaatcctcaggtagtatgcatttcattctggaagaataaaactgtattttatctatttctccttgcatttaccatagacttttccttcacatatttatttagttgccatattttttgcacatataggtaggtatgtttttaaatttgtttgtacattggcctttttgaattttataatgtcccattttatcctgttaaaagcccttaattaattttaaatctcacattcctgttgatattcacttatctctttccctatgttcctattttcaacttttataacagtgttttaattataaatggcctttaactggcttttgtttttcattccaaagtctgtcttctaatgagagaatgaagtccattcatattcagaataggatatatttgatttttaatcttccatcttacttcttgattttaactcttccattttaatttttaaacatttattatttacatttaggttttcttttttttttttccttttgtgaatttggaatttccaccatactttgtattccactaatggttatcttctatctgacaaaaacagaaaaataagctttgctgtaagttctgtaaggaagtatgtacttggctcatattccatcaactgttgtagagaaagttgatgcaatcaagaattttcctgagccccacatagggacataatcaaagacaacaaattctttttccaagaaagcctgtcgcttgcttggtccaggtctcatgtacagtcacaggtttcgtatgtaagccactgcattcccctgaaagccctaacacttctttgccttgcctctccctttctaacaagaccagaacaggcgtaacagcacaagatgactggaatacagacttccacattcctatttctttctcataacctgacacacgtttccctgccattatttacaagcaagaaatgaactatttcccctaccaaaaacccactgctttcaccctaagataatctattttcaccttgaaaagtgaaagagaagttgctcagtagtggccgactctttgctaccccatggactatagcctgccaggctccaccgtccatgggattttccaggcaagaatactggagtgggttgccatttccttcaccagatcttcctgacccaaggactgaacctgggtctcccgcactgtaggcagatgctttactgtgagccaccggggaagtccttactactttttaaacacatgagactactaaaataatctcacctccctctactctcttcctcccatgacaccttcaaaacacttttattctgaactaatcataccctacccctaaattttctaagattgctcaatatttttagtatcagattagaatttcctttatataatggcccttctttttcaagagttctcatttagtctatttttatacatttaattatgtgtataaatatatacatatattgtgtaagtacttctgttctttgattgccctgatctagagtttccagctttggctccttagttcttgcttagaaaagtggttcttactaggcagtgtaacacttgtctaaaaggtatctaaataactataggagtatttgtgattgttacattgactaaaatactactgaaatctgatgtctggttacacagagatgctggatatctatctcagtagacatgaggaaaaagtttcaccctcctacttcatatcagtagattattgacaaataatgtcaaacacttgttccacatataggcaaatggaccaatttaaagcctaaatttgtcaacaatttgggtgaatcaaaaggaaacgacaataaagtcctggccaggtctgtgagtggacaagtgaattggataaaaaaagagagactagagaaggaagataaatacagcaagaatgtactggttaataaagcagactactaactatatgaccttcatgttacctaacctatctgtgccttggtttcctttccttaaaaactattttactaaaaatttttattataacgttttatatttttcttttgccattttggtttttcataaacaactttcattgaattaagttgctctatgttgctctatatttgtaagaaagtttaataatcctgcctccgttttcttttatgtaaaacagaatagaacctacttttcagagttgtaattaaaattaatgatttatatttttagggtgcttagaatagtgcctgacatacgattaacactatgggagttatgttaaacaaataaccaaaacagaaagagcaacaaggatggttattaaattcaacagccatgatcacaatgaaagtttacactaagcactattctcagtgtttcatttaaaagaaagtgaagtcgctcagtcgtgcccaactctttgcgaccccatggactgtagcccaccaggctcctccctccatgggattctccaggcaagcgtactggagtgggtggccagttccttctccaggggatcttcctgacccagggatcgcacccgggtctcctgcattccaggcagacgctttaacctctgagccaccaggaagccccaacataagtttcatttatgttgactcatttattcctcacaacagatctataaagtcattagtacatgtgtttgaattttacagaaaagaaaactggagcaaggagaagtcaagtattgcttaagatcacaaagctagtaaagggcagagactaaatttgaacccaagtcatgtgattttcaaatccagtctcttaatctctcatatacagtctttgtaagaagtcctgactttggttattaaccaacaataagagttgatatgaagaaaaagatctgtggtgagaatatagtaaaagatctttcctttcctcttacttactcattcatccatccagtttggattcagagattcttaccctattctataggttataatccttttactatcatgtattttgttgctcaaattagccagtgggagctcttttaaattctaacatctctaccgttccatgagcagagccatgtttttatggccccacaagatgttctttctgtggcccagctctaaaagcagccatttctctaaggagtcctagtttctttaaatgctgaatggaatttaaaaaacaaagtcttccccaaagggggatgtggtactactttgtacattgtgcatgaaccttgaaaacattctaaagtgaaaaaagccagacacaaaagaccacgtatcacatgattccaactgtatgaaatgtccagaaaaagcaaattcatagagacagaaagtacatcagtagttgtcaggggctgaagaatggggaggatcaggagccttggcttagggacctgattttagggatgatgaaaaggtcctgcaattgcacaacctggtgaatacaccaaaagtcactgaattctagatttaaaaggatgaattttatgctatgaaattatatctcaattaaaacaaaagaaaacaaacaggatctgggcactaggtgtgctcactggtactggggttatcattgcatgcaggtccccttaaaggccacattaagaaacatatctttgtatattcatgaatgcattcatatgtacatacaaatgtgtgcagacacacacacctgcacatatatactccaatacacctagctatctacataaaaacaaacggagttcacactgaaatgtccgattccaatccaatatgcagtatttactgcaacctttccctctttcagatctgtgatttccttcctcaacagggcagaatctcagaacaagaatccagactgtgcagctctcttattcattatacttcagtatgtctatttattttaacaaaaccatatttattgaataaaattcagttcaattggtactggaaagcaaagatctcttaactggtactcacagtgatactatccaagagtttggccatatgtttgataatttcaccatgttgtatgggttgcatttgcagcaatttcttaataacaaccacactttcagcaacaactatttctgaaaagaaaaaaaaaatcagattattcgtatttaaatatgaatttcaattcaattcaaagtcaattcaaacacagtattcttagtaaaatgtaaatttaatttagcaaaacattgcacatttcttaaatgactaggtgaaaactaaaacaagagagaatatccacaacctgcatccctttcctgccagatctccctggcagtgtgagcacttctgcattgaaggcttcagttccaagagggactctctccttcagggtctgataactgctcccaatcctcaagccctttccctttaattctagatatggcaaaggcttcccacctctactagcctgctagccccagggtattacagtacatcttgctggcttcccttaatccgacccacaattaataaatagttccttcattaaactcttttcaatcatctctttaaagtgtatcacctgtttcttgccagggccttaacagtaactggtacgaggagtggctccaggaagcagaccctcaaactgggattctgagattgcactattatagactaattagtggtccagagctccgtctttggtggcaccagcagtgaaacacaataaaccagtcagagcacctgacttcatggaatgaatcttatataagcaattactaaggttaccaacaccaaagaaagacaccaacactgcctttccttgttattgtggctctttttttttttaatcagctggtattcatggatattagagattccctggtatacattataaaggtttattttaatattaccctgaaaatatgccacgactagggttctgttactcattttctctgaaatatattttcttatctagctccctttaaaaatacaagcgaaattttctatcattctaattattattgaaatatgtatttcatattatatatatttcttcatgggaacgatatattaatatttcataatgttttagtttgctgctgctgttgtttagttgctaagtcacgtctgactcttttgtaaccccatggactatatgtagcccgccgggcttctctgtccatgggacttcccaggcaagaacactgaagtgggttaccatttccttctccagagagctaatctgatctcctgcatcggcggcgggctccctaccactgagccaccagggaaggcaatgttctagttaaagaaatgatgtatttcttttaattctcataataacatagggtaggcagctgattatcagcattttaaagaggaagaaagatgccctggagaattcaaactcagaatcagaatctaccattttatctttaatgttctatgttactatgagtaggtgttgcttttataaagactgcctcttggagctatgaggaaaacaaagacaaatcagaatgacactctgccctcatcaagcttaccctctgctaggaaacactaagtggttatgtaagaaatgactatgcaatgtaatggttttgaagaatcaatagtataaaattttatctttttaaaacatattgcaaaattagtccaagtttttttttttttttaagttgtatatttttaattattcacgtgtacaggcaaggttgactaaccgtaactatagttgaaataaaatttggcattatttagcctcatgcgaaaagctgactcattgcaaaagactctgatgctgggagggattgggggcaggaggagaaggggacgacagaggatgagatggctggatggcatcactgactcgatggacatgagtctgagtgaactctgggagttggtgatacacagggaggcctggtgtgctgcaattcatggggtcgcaaagagtcggacacgactgagtgactgaactgaattgaactgaactgaccctttgaagtgaagaggtgaagtgaagttgctcagtcgtgtccaactctttgcgaccccatggactgtagcctaccaggctcctccctccatgggattctccaggcaagagtactggaatgggttgccatttccttctccaggcaatcttcctgacccagggattgaacctgggtctcccacattccaggcagatgctttaacctctgagccatggtgccaccttatcttccgatcgttattgttatggattaccacaaacttggtggctgattagcaacatgagcttatcattttacactttgaagccagaatttaaggtaagtcttatggagctaaaaccacggtgtcaacagggctaagttctctgtggaggttctagggggaaatccattcttagacttttccaaattttagaggctgcccacattccttggctcaagcccccttccagcgaagatatcattctaatttctgcttctgacatttggttacattgggtcccagattactggatgaaaaatctctccatctcaagaatcttaatcacatctgtaaagttccttttgccacattagataacatattcacaggtttcaggcatcaggacctgaacatcttgcgggatggtggtggtggtggagtgctatttacctaacctgggtgccttcccattccctttgggtaattccaccctatttttcctttatgctaccttttggctttcaaagacctcagcactcccctacaagtacaaaatgaacttgtgttctgggcctttccaagctttctctttgtcctcaacagaacttaattgtactgactctaagaattacagcctactattaaaaaacaacaacaacttattttagaaagaacatgtaacaggggatttaccatctaaccaatttttaagcgtatgatacactactgttgactacaggtacagtgttacacagtagatctccagagcttactcaccttgccaagtaaaacatgatgctcactgattagtagctgctcgctttccttttcttccaacccctggcaagtacctttctactcttggattttatgaatttgattattctaatatctcatataagtagaaacattcagtatatacctttctgtgactggtttatttcacttaaggttctcaagattagtacagcctactattatcttcattttacaaatgaggaatctgaagcacaaagagatcaggtaatttattcaagacaacattagcattcaaacataggtagtctagttctgcatgagagcaatagctagcagctgagtaagtgttcaatagataggaagactacagtatgcttgttttatattgttgtgtccctccgttagaatacgagctccttaaaggcaggaacctcttataggcttgtaaataccttattcatctattccacactcactaaatacctcaactaattcaaatttttcaacaaatgtttattacattatataaacaaaatttaaaaaatagtcttttgccccaattctttcagtttacagtagatggtaaaaaagcttttcagaccagcaaattttgtgaaagaaaatcaactgggagttaaattattctaagttaagtctactgaaaatgcagatttctccctaaggtctttaagaaatctgtttatcagtgaatcttacatagtgataatgggctattttaggacaaccttcaagtcttcctagaagtcctgtccctgacaggaaggaagaagtcagcagcaacaacaaaaaaaagtccccaaagccttacaggtccaagaatatattaaatatatgcaaaaacaatgtagctcaatgctatctctgaagctgcaagatacagtatccgaagagatgatgaggtattcacaatataaaatcaaagaggcagatatccttagaggtcccaaaggtcttacagattttaaagaatccggggcctcattcatagcacttattcctagaagcagatctttcaacagaaagacaaagaggctctgttataacaatcggccgttataaatgaaaaatattattgctttctttattgttactgagccaaatttccaaactacagaagtgcagcacatacaataaagagttaaagaatcaggctaatgataactatgcaattagaacctgaaaaatataatttaagtttcttaatattcacagcagaaaaaaaggtccacggttataaacagagttttgatttacgaaaaaccaaagtctaaacattaaagtatcagtttaaattagtaaatctacctttaagaatgattataaattagtctcctccaattgtctaattataaaatgatctagtctttgcttagaagtactataagggtacagcatattcatctttttaaaatgaagtgaataaaaaatatttttttagaaatcaatgtgctagaaagctgaagtagaaacatcggctttaatatccagcttgaaaatttcatgtgagaaaaaaaagtaaaaatacaaaatttaaaaaccctgaatatattttatatgtgaaagaactagccagtgttctgatttgtgtgttttttgtatgcaatcaaagtgaagtgtgtcttgtttgatcaaataggaagtcattattaaagacataggaaaatgaagccatatttttaaactcacaatttaaagtgtgacagaaatagacacaaagaggatgctattattaaaagtagaaacagataaaatgaatgacatttagcatcctatcctctgtaattaccgtctacagtcagtgtttttaaaaaatctatttccttgataattttttttgccacttatttggagttacaatactatacgcagaaaaatgttctctccattataatatcctgaattgacaggttaacagttataattttatgttgattgtgaagatcactcttatttggggataaactttgtttcaaaaagttttttttgttagaagtacttacaacaatgttacagctttcaaaagagatctacatgtgcgaaaagataattaggagtaatatttgtagtaaaaagctatttttcaaataaaatatagaaagtaatcagttttgttatgtttcaccctatggttgctatgtcatatatgcctgtgtctagatatgacataattttatttagaatcccacaaataatttcaataattttatacagaaaattatgtgtttcctaaaaagaatccctgttttaatctcttttaaattaaataaataaatacctttaaaggtgagagttggagtcttttttctccaaaaggtttcatttattttaaagatatatcatagaaataactgatattttaccatagaaagaatgaactctagactatgtattttactggatattacctatccagttctacaaaatgtttagacactgactggcttaaaaacatgaaggtgttccaaattgatgacttctacatttaattaatcttgaatataaaattattaaattaatctgggaaaaaacaacttgaaattaacaagtttaccgtacttttctgatctagcctttttaacttctcctgttgttaagtcatttgcctgcttttagcaccctctgcaggtgaaccaacattatacaagacatatgccattaaaaaccagtaaaatggaacctttgtgggaagggtgaaatgaaggtgattaaactgtgaagaaataaaataaacagactacattctcttagttctgttcaggcaagaaaattctgtttgtaagttaattatccaatttactaaaacaacaacaaaaaccctgtgtgtgcatatgtgtatttcaaagataaaatgttactcttcattgtgatcacggacatagagaaaaagctcaaaggcaatactaaaaaagaaattacaatttgtagatcatgccaagaatatccaaatgataaattatttgcaagtgaaatgaaacagccaactcaccatccctgttggacagcagacacaccaggccgttgaggcatgtgtcagagacttctgtgatgctggttgcacatctgcctatagtctgaatagtggctgctgcaaactgtttatcctggcttttcacataggtctaaaaaacattgcctcaattagtttatacactggtactatcaagcaaagaaaaatatccctataatatgaagctctgtcaaaatcaagttctagaatacataatcttctcctctacaggcacaataggaagtccaccttttgacttaattcagttctgttttttcacttaaagaatgtgactgtagtacaggcacgttttcaagtcaggttcattcacctgaagccacagtagcttataactccaaaacagatagtgggggagcagtcacccaagatagcaattagtttttaagtgcaaggtggaaagaaatgatgagacctctctttttgtaggtttcagttcatttaaccggcagcatctatgaatccatgaaaaaagggtggccttttcagagatactaagcctaaaaattgggagaagtggaggaaaaggagcaatatgctaccgataaacattttactttaaaaaaggttatgcgaatggtgataaaactacaatagccacagtgaggagcatttcaataaagactttataaatatacctgatttgcaataaaataaaacatcatacttctgaaaaatattttcttgaaaaaaatgttttaaaaatacagtgtaaaccacatatttacacaaacttaagaaattaatcacgtatttaccacaggcctcaaaaattgtcactttggttattactttcctaattcaaaaactaagcttttattgtgtacaggcagaaagagatgtactgttaataaataagcacatttatgtacaaaatataaatggatttaaaatcccattttcaagtggaattaaaaaaaaaaaaagattcccaaactcaaataacaagcacataatgtagaattaacaccttgttcatctaacatgcaaaaaaggacatgcatttaaatggtgtctaaatgacaaatggaggagaaaatccaaaaactatctaaaagacacatgaaattggtgaaaatggcaccaaaaacatgattaaatgttgaagaaataaacaaattaaatttcttaggtccctgtaggaaaaatcactgtatttaaaaccatttctgaacgcatgtacacccgtggtggattcatgtcaatgtatggcaaaaccaatacagaattgtaaagtaaaaaaaataaaaaaataaaaataaataaaaaaaataaaaacatttcccagttgattacctaatttcctcaatcacaaaaaataagtcctttgaaaagttctccattatttcaaaaagttataaagaaactgtaacacctatggacataacacataaacacagaaataaagtacacgtatagacagtgattaaaacagatgtataaagaaagaatatatttaaaagtctgactaaagaatggaccttattaaatagcctgatattaaatgaaatgactggattaccaatattctgaaatagataaacaatgccataaaattacctgggactcactccctacaactccagtaacctgacagaagcagaaagtagaaagcaaaaggacatccaaacagattacacagatcatacatgacaacaagatatgggacaaccgcaaacacagagacagaaacttaaaagtaaataagcaaacctataaaaatgaattacaggtcacatttcagcaatgttctacagccacagattactagctaagaacttgagatactgtattttctgccatgcaaatataaaatgagcatatatcctaattttctaagaactttttctaaaaaaatatatagcataaaagtatagtaatccagttacaaaattacaaagcatgaatatattataatatcccactactcctgttaaaagtataagatcacacagtcaaaaagaaatacaatgtctatatagctaaaaagaaatttaggacaggcataaagaacgattatagcaacaaaataactttaatctataaaagctgtgtgtgtatgctcagctgctcagtcctgtcctactctctgggaccctatacacttaaaagttaccacctatcacacaacctaagcaagaatactggagtgggttgccatgccctccctcctccaggggatcttcccaacctagggatggaacccgtgtttcctgcactggcaggttggagtctttaccagtgagccacctgggaagccacctataaaagctgggggtagacaaaaattctgggaatactgtgtggcatgtggttggtatactttagttaagaaaaaactgctgatgaaatgtaaaacccataatactgatataaggttttgtattactgtgctctaccactaagtcttcagagctaactctttcatcataaaaagcctaagagccatgaggcaatttttttatgtttttggagcatgtgtatctgggaagcatctcatctatccacataggattttaaaaatacaacaaaacattaacaattaaacaatcatgaggagggcaattttaaaccatttattttgagctatacatgaagctagcagacaatgtctaaaatagaagcagataatcaaatagggacaaccaaataagaaatgaagccattttcctgagtacagagtgtagcacaaactattgatgatgataacagagttataaactagtttctcatattctacaatatgaaagggactatattttatttctcttaaatttaaaatttgtagttgatgtttattattgaaaacttattagttgtcaaccttcttccaaattatacagttttatttatacaattacacacatctaaatcgagaaagacatatatctaactttaaactgaacagatgctttagaagttactgcataattagcactgtacacaaacctgaaattctcgaaggagagttgatatgttggcttcatttgccaagtttgtcaaaatttcaagctaaggtagaaaaagagaaagtaaatgttttttgatggtaaagagagagcaacacggaaacttacaataccatatgtaaaacagagagccaatgagaatctgctgtatgaccagggaactcaaacaggggctctgtgacaatccagaggggtggggtggggagggaggttcaggagggagaggacagatgtctacttatggctgattcttgctgatgtttgacagaaaacagcaaaattctgtaaagcaattatccttcaaataaaaattaaaaaaaaaaacaaaacacaaagaaagtgaatttaataaaggctagccatttgatagaaaggtaatttctattttttaaaaaaatgcctattacaaatgtgagacactacacctttcagctgaactttgtctccctacatctacaaacagaataattatatggtgcttaaaaaataattacaaaaaagagaattctacaccttcactaattgtttgccccaactttataatttattatctaattaacctaaacaacttaaggcagttttctttttcttttaataataaagttagaaaacaacttgccctccatgtaataccattatattccagataccaattaattcttttgattagttttccttcatcttaccaaaccaaatatttagacattttaattctttcttctggatttagttaaaagaaatgtgcaattaaaagttcatctccaataggcttgctaaaaaaattcaatatctactcataaaaaaatattccatttatctgaaggaaagcttcaaaaaggaaaacaggaacacagaacagatgggacaaacagaaaaataaaatgaaagatgcagacataaagatattcatatcaagaattacattaaaggcaaatgatctaaacactctaattaaaaggcatagattgtgtgagctttcctatatattctggatactagtcaatttttaggttatgtactggaaatactttctcctatattatgaactgacttttcattttattttgatgagaatatcttactttgttgtacaattttaaaaagtctaattcttaacatagagaaaaggtaaaaagcagtttttatctagaccacttgcttctagagttgccaaaacgataccacatcatccccaaacacaccttgtacgtattttctgcaaacaagggacattgtcctacaggccacaatacaaccaagaaacccaggaaattaacactgatacatcaaacctatacaataatcacttacatttaagtttcactaattatctcaacaatgtattaaaaaaatagtgtatgagttccatatcatacattatatttagttgtttagtttctttcagtataaaagtttctcaacctttcttttgaccttcaggacctggacgcttttgataactgcaaaccaattattctgtaaatttattatataatttgggcgtgtcttagatttttttaaattaaacttaagtttccatgtgattaaccaatcattccaatttttgttgaatagtctactattgaatagctctcattggtttataacgtctcccctcatatatgatacattttgataggcatagatctgtttccatgcttcatatgttattatcacatattccaagtatcacattgttttcatcattataactttatattcataaccatactctatactgtagttatcattccctgaatacaactctttcataatctcttgtatttgcataaaatgtgccttttttcttacactgaaccctacaaccttgctatcaacttacctaccaacaacaaaaaaaatgacaaaatcatgtcattcttttcagatccactctaatatcatcttttccaccagtcttttctaaacataccagacaattagctgcatctttctttttttccacaacactcaattcacatctattaatcatttaaaacacagtgctaaaattatctatgtacacgtctgtctctttcacttactgtgagttattcaaggtataggcagcatgtcttaactttgtcttattaaaatgtagtacagcaattagtatacaataatgtagttttaaaagcataaagaaaatcccccaatgtatctattaaaaaaaaaataggtctccattttgaaaatgctaaactaaaagttacagcaatagtgtcaaagtaagtaagcattaaagtctttgaaaaataagagtatgcataccttcagtatcttgatcatagttggatcagttgacctaacataaaaactcttcagataaggttcaaacataccctagattacaaaaataaatatataaatacacttatgatactaatgcattcacgtctttcttaaattttgtgttcacaacatacatacctttctttgaattgacagagttgctatattctggaggacaatatattgcacttccctagaaattaaagtagaattttgactaggtatattttccaacaaaatatatcccaaagtaaacagtatattaaagaaaaagaatcagcagtaagcttcatattgaaagaaactcttaaatataatactgaaaaatttctagcaaatcttaagatatttatgccttcttttaaaaatacattttccctataagctatacaacattagatttgattcatcaaatggaagagttacaagaggcagagccaatgctgtacatgctctgaacacatgccaagaaggtgttccagcgccaacggaacaaacacgaccacagtgttaacacagactcctggctggagggctcttcatgtgactcaattctgtccaaagtgaaagacaggttttaaaagaaaaaaagccatgttatcttaggtccaaatatctaagaaatgaatgtacaactgaatctggtataacgcttcatgtgaaagatgcattccagatccttatacgaaccagctacggacaacaaaacttaatgaactgataaaagggaaagatatgactatgcgaacagacaaaggaacgcaaaggaaatagcatcttactaaggaagggccaaagccaacctagggcgaaagctgtggcactgattctgagctaagaacaaaaataaatatttatctttcttctctcaactcattaacagaagtactcaaaggaaaaaaatttaatttaaaataactaattactgcaaaatattcagggtaagctaaatagcttgaaacaacagttttcttaaatacagaaaacaaaacaaatgaaacatctgatctcaaacttacgaagtacatgtgacaggaactcaaggtttcctgaactgctgacttgaattgctgaattacagagaggtaaaattgaaaagtacactgctacctacctgcctatctccaggaaataacaagcttatgcatttctttaaaacaagtaatattaagaatatagctctcttcttaaatagaactacagtaattaaatattgcaactttacaaaaagcagttctgtcataaactatataatttggcatatatattgctttatatgaagtcttatataattatactactcactacaataatacatttaatgtaatttttcagtgactccagatttaatgtaaatccccaaaattcttattgtcatgcctagaaataccaaaatactaggctactgtaatagcatatactatattacaaaaaaatacttccaatttctttgggcttaaggtaaaaaaaaaaaaaaaacaccttcaatatttaacattaacttggaaatcaataatctaaaggcttttataataatccccttacgtatgaaatctcaactgataaaatacagtgagaaccatgtgttacatgcctaacagacacatttgatttgttcaaacattactagtgaagtaatacaatacaaaagagaacacacatataaaaccatgtcatacctattgctacgaagcaaacgcactagtgatttagaaataatgccagcttctgattttggtgctatatgccaatacagttgagcaactgccataaccacctaaaagataaagcatgaaaacagaaagaaccatgagcagttccacactacagtttcaaagtatgttcttacatatgatttcctttaacgcctacaaaatccccatgaagtaagatgagtatattgttacctctgtgtggcaggttgaacagggtccccctaagaatgcatgtctaccctcagaatgtgaccttatttggaaatatagtctttgcagatgttattaaggtaatgatcaagatgagatcatacttgattatagagtgagccctaaatccaatgtgagtgtccttatcagagacagaaaaggacacagagaagaaggcagtatgaacacggaggcagaaaccgcagtgcggcctgtaagtcatggaatgccggaactgctggcgatcaccagaagctaatttctccctaagagcttccaggaggaacccaccctgtcgacatcttgacttaagactttgggtctcctgaaatgtgaaagagtaaatttctatttatttttaaattaacatttttctttaataaaaaattaaagaaatttttatgtctttaatctacacagttttttctaaactaatatggcagctctaggaaagcagtactgtacaccctcagaaaaaaaaaaaagaatgttcagtgaatcacccaaggtctgacatgccagtagtacatggcaaagcttgacacacactccagagcccacagtcctcctagtgttgctgctgcgggtgctaccctgagacaggaatgaaaccagacacttaaaggtaacagtagtcagtcggttaaaattcttaaagaacctccaaattcaatatatttaagttataattaagggaactctattaaaacaattcctttaaaaaaagcagcatttgaaatcctgtttttcaaatgtagaaccttaaaaatagtgcttggttcaaagctattacgggggtagtcagactttccctgtcataaaatataacaagactatgtttccccacgtgcctctacacttagatccagagatcaaaactccagactttccacttagtgaaagtattcagcacagcatgtgacaactgtgaagagagagcttcagaaattaatcatcttgtctttggttatgaagatatattaatattgctttagttttgcttcggctgtaggtaacaaatatatagcaggacttctatatatgcctgagagtttacagtacttgagggtgcttaaagcaaaaacagtttctcctagaactaagaaacattttttaaaactagagttataggttcctcaacttactgctctatggcatttttgtgtacttttcttttttgtaacaagactgacgtccagctttcagacatgacttgggaaattgagaagtttaagaatatctaatttcttcacttgtgatctacaaatacacttgaattatagaacagcctctgctgaatttaaaattttagtaagataaacttaattactgacaatctacaaataggtgacagtcatttttaaaaactactgaaacacacagatggctaacaagttttatatgtagaaaagaaagctgaagcttaataaactgtactttctatgtgtgttaatgattttaagattctagattctacttagtatgtcatttgttctgctacattaattagggcactctcaaacccaaaggggtgaaaggatcttctttttccccaatatttacaaatctaagtgtcttaatctctcttcaatatcccaaatttgaattttatagtctaatttgtaaaagccatgagggaagctcccatgactcccaaacaactgaaacacaacctcacaggccttcaacacttacattatatatgtttataaaaaagtacatcctgtaaaaacttttctattcctaaccattcatacactatcaccttatccagactgtcagaacagcttcccaacactgcctccagtatcggttatctccaattcaatctacacaggactaacaaagtttcctgaaacaaattctcaaagtctctctcataagctaagaaggctaaaaaaaaaaaaaaaaaaagtctattcacaatccttccaaagtcaacctttacacatatttattgttgctcagtcactgactctttgcaactccatgtgcagcacaccaggcttccctatccttcaccgtctcccagtatttgctcaaacacatgtccattgactcagtaatgctatctaacctctgctgtgcccttctcctcttgccctcgctctttcccagcatcagggtcttttccagtgagttggctcttcacatcaagtggtcaaagtattggagcattagcttcagcatcagtccttccaatgaatattcagggttgatttcctttaggattgactggctgaatctccttgcagtccaagggactctcaagagtctattctaacaccacagttcaaaaccatcaattattcagcactcagccttctttacttatggtccaactctcacatcagtatatgtctactagaaaaaccatagctttgactagaccaaaatcactgcagatggtgactgcagccatgaaattaaaagacgcttactccttggaagaaaagttatgaccaacctagacagcatattcaaaagcagagacattactttgccgactaaggtccgtctagtcaaggctatggtttttcctgtggtcatgtatggatgtgagagttggactgtgaagaaggctgagtgccgaagaactgatgcttttgaactgtggtgttggagaagactcttgagagtcccttggactgcaaggagatccaaccagtccattatgaaggagatgagcccggggatttctttggaaggaatgatgctaaagctgaaactccagtactttggccacctcatgtgaagagttgactcattggaaaagactctgatgctgggagggactgggggcaggaggagaaggggacgacagaggatgagatggctggatggcatcactgactcgatggatgtgagtctgagtgaactccagaggatgagatggctggatggcatcactgactcgatggatgtgagtctgagtgaactccgggagttggggatagacagggaggcctggcgtgctgcgattcatggggtcgcagagtcggacatgactaagcaactaaactgaactgaactgactagagagacttttgttgcaaagtggtgtctctgctgtctagatttgtcattgcttttcttccatggagcaagcgtcttttcatttcatggctgcagtcactatctgcagtgattttggtgcctgagaaaataaaatctgtcactattttcactttttccccatctatttgccatgaaatgatgagaccagactccatgatcttagtcttttgaatgttgagcttcaagacagctttttcactctcctctttcactttcatcaagaggctctttagttcctcttcactttctgccattaaaatgggatcatctgcatatctgagattgttgatacttctcttggcaatcttgattacaccttgtgagtcatccagtccagtatttcaaatgatgtactccgcatataagttagtaagcagggtgacaatatacagccttgatgtactcctttcccaatctggaaccagtcctttgttccatgtcctattctaactgttgcttcttgacctgcatacaggtttcttaggaagtaggtaaggtagtctggtatttccatctctttaagaattttttacagtttgtcgtgatccacacagtcaaaggctttactgtagtcaacaaagcagatgtttttttggaattcttttgctttttctatgacagaatggattttgacaatttgatctctgattcctttgccttttctaaatccagttgaaccaaataagcaggataccaaaacatattggaacaaaaaatatattacctctgctgctgctgctgctgctgcgtcgcttcagtcatgtccaactctgtgcaaccccatagacggcagcccaccaggctcccctgcccatgggattttccaggcaagagtactggagtgggttgtcattgccttctcctaaactacctctagttggcatataatcaaataagcagggaaccaaagtatactggtacagtacaaactacctctatttgttttactattcaaaaacatttttgatcagtaagtatttggactataagccaatttccaagacaaagttaaattaaaaatcagtaaattataaagtaattttagttggcaagttacagctacttaagtaacatcaagtcaagtgaggacacactaaaatataagcatattttacaatattaataaaataacatatgtgtcattattgtgcatagttacctaaccatgatttagaaactaaatacaaagtataggataaaaacttctgctaattcctaagatacacatacaaagctctaaggatcaaactctcaagcatcagaaaacaaagcagttcaagggaaactctcattttcagttttaactagttgcacagaatgattcgttaagaatttatttttaactaaaataagtttaagaaaacatttaacttgaattcatcaaaacttacataacttccagttaagaggaaacaacggtatagtaaagaaagtaaccagacaaacccagagaccattctgcaagacctgagagttcagaagatataacaaccagatgtaatgcagtataactggtataggtgaaccagttatagaagaatttagggtaaactggtatttcatgagatgaaaatttactgaagtagaaatagggaactgactagaaaaaatatgttacaaaatattatgtgtactatgacttttatcttggtttaaaatatattatgtacagacatacacacatatgacagaggaacacttatacagaaaagaaggatctggggaaaactgcactaagatattataactgatacgtgatggaaatataatgtttatattagtttttctagtttgtattttctaattttcaactgtattcttttaaaatattttaaaatataaagagttatttaaaataaagatataaagcaaaacaaaaacttaggacctgagtaaagatgatttttaattattcctaccagtaaaatttactatgcctgtatgaggcatcatgctaggtgtttctaactatacattagtcttttcaaaactcttattagataaatacaaatataatgagcagaggagttagacagaatcactgactcaacagacatgaatttgagcaaactccaggaaatagtgaaggacagggaagcctggcatgctgcagtccacgaggtcacagggttggacatgacttagtgactaaacaacaacaaccttattaagtgctcacaacaataatttcatagcagagaaatacatacagtcttccaatcaactgcaaaacatcttaggctcgtatctcaggaatccaattacaaaatcaaaaagaaaatgaagaacagtaggcatacagctaccaaaccaaggaacctataaaaacctgatttttattatacaaacaaataaataaatgctccattagtacactcaaaattacttgctgaacttacatacttttaagcactgtttttaaaaagctgtgaattatttcttgtaatggtttttacataccgctgcattcctgctctgaagcaaaggctttgtattccgaattaaaagcctatggtctggatccatagtatatggcctcttccttttgtcagccttttccttctgttcctcatcagaatcatagaaatccttttcattgtcctctagaccatcaccctacaggaaagaaatccaattgcaagattagttcagacctggaaccacccaaatactacacaaagaaaacttttaaaaaaacatctacaataatgatagtattttacaaatactactatggaggcaatttgaaactatgctacttatatggaagaaaggccttacttttgtattttacggcacagtaactgtcctttagtgcaacagataatatttttatattatatagcaaacctcacattaaattagcatagaaatacccacagtcatccaaagggaaaagctgaccattaaattctaacaaagcctatgatatgatactactcaaagctgagaactgtttccataaattatcagtctctctgtaactggatcaaagggtcagaggaaagaagaaaattgtttgaactgcaacacacataaaagaaatcattaataaagtttgacaggttaaaaattggtaattaaaaaggcccctgtgttgtcaagaaagactgagtttgagatttatgcatatccctgagacttgattataatgcttttgtcttacactttttatttatttgaattctttattatctctgtcagtaaatgtagcctataggtgcatgggtccgtgcatgcagttgttccgactgtttgcaaccccccggactgtagcctgtcaggctcctctgtccatgggattttccaagcaagattacgggagcaggctgtcatttcctccttcaggggaccttcccgacctagggactgaacccgtgtctcctgcattggcaggattctttaccagagtcacctgggactcccagcgtacaggtaaggagtcctaaaaataaacaacaacaacaaaaagcacacagagacgatatatttaagtggatccagtgcaatcacgagggcttcccacgtggccctagtggtaaagagcccacctgccaacgcaggagacgtaagagacacgggtttgatccctgggtcggggcaggagggcatggcaacccactccagtattcttgcctggagaattccacagacagaagagcccggcgggctacaggccatggggtcgcacagagtcagacgtgactgaagcgacttagcacacacagtgcagtcactattcagaggtgatttctgttaccatgtacctgcaacctactttccactcctgggaagatgggatagatacacttattcctattcctctcactaagaacaactagaaacctaagacattacatataaaacaatgtaagaaaagaaaggcagagagagagaagaaaggctggatatggacacctcaggaaccaaagaatgatacaacagtgagttccttggattttcatttttcctcatatattaaagactgggtagaagagaagtgagttagtaagaaaatcaattaagtatagattaaacaaatccccccaaagcctgctccttatagccaaagaaccaagaaaaagaaagtctagcaagacagaaaactttttaagaaaataactgttctagtgcagtcaactctagagaaaaaaccacaaccctacccctaatcccacaagcaaagactgacaaggagagcctagatatccactcctcccctcagcctcccactggggtgctatcagaaaaggtcaagatagaactgagattttaatccccaccaggaggtaatacggtgtggggagctaggacatccaagtctgctgatcaatacagaggtgacttctatccctggctcccctacgctgggcgcagaggatgcttagtggatactccacacaggacttgcagcagcaccagcccatggtaacaaggacataccactctgaggtgtcagtggaagacaaacctggaacagtcatgagacacatccatccttcccagccagaaagctatcaggggagtaacagtgcggagccagatcccacagtcacccacagcaacaatgagccccctgaggtgtcactgggggcgaaggggggaacctggacttttagcgtgacctgacactaatgagatggcagcaccccactgtcctttgctggaacagtctcaaacccagctaaaacttaaaatctgaataagatccatagtctcataatatccaaaatttccaggtttcaacaaaaaaatcattcagcatttcaagagccaagcagggaaagcggattccctggttggggaactaagatcccacatgctgcgtggtgtggccaaaataataataatacaaatggccacaaacatgaaaagatgcccagtttcactaacaaagaaacaaaatgaaataatatttaaaaaaaaaagaagaggcagaaaaaaacaacttattcactggcaaaaaatgtatgcaactccatgtgaaacttactccttggaggaaaagctacgacaaatctagacagcatattaaaaagcagagatatcactttgctgacaaaggtccgtataatcaaagctatggtttttccagtagtcatgtacaggtgtgagagttggatcataaagaaggctgagtgctgaagatttgatgcttttgaactgtggtgctgaagaagactcttgagagtcctttggactaaaaggagatccaaccaggcaatcctaaaagaagtcaaccctgaatatccattggacagactgatgctaaagctctaatactttggccacttgatgtgaagagccaactcactggaaaagaccctgatgctggaaagattgaaggctttgaggcaaagggcatgacaggacgagatggttggatagcatcatcaactcaatggacatgagtttgagcaaactgtgggagaccgcgaaggcagggaaccttgatgtgcttcagtccatggggttgcaaaggagtcggacactacttagaactgtacaacaacaacatatgaaacaaggggctagtgtctagcatatatagaccactcctacaacacaacagtaaaaagccaattcagtttaagacagcatattaaaagatatccttataactgaaacatgtctcccctaaaattcatatgttgaagcctcaaggtgaccatatgcttaagcagggacttcaaggttaaattagattttatcaatggtattctaatccagtacaactggtattcttactagaagagagaaaggcatattagaacacagcaagaaggcagccatctgtaagccatggacaggcagcttgggagaaaccaaacttgctaacaccttgatcctggacttctagcctcttagaaaaactgtgagaaaacgatgagaaataaatttctttttatgtaaccagtctgtggtattttgttacagctttagcaaactaatgcagacaattacctaagaagatatccaaagggcaaacaaagcacatgaagcaacacaaattaaaaccactgcaaggtgcttttgttatggcatacacatcagaattgctttcatctaaaattaaatttaaaagtactgacaacaccaaatgacagtaaggatatcgaggcaatgggtcattcgtatgctggtggtgaatgtaaaacattacagtcactttggcaggttggcagtatcttacagaactgaacctgtatttaccatacaacccagaaattacactcttaggcattcatcacggggaaatagaaattaattctcacaaaaatttgtacatcatagcagctttatccctattagccaaaatggaaacaacacagaagtccttcaatggatgaatggttaaacaactggttaagcaaatggttaaacatctctgccatggaataccacccagaaataaaaagaaagaaactactgatacacacaagtctgattaatgtccagagaagtatactgaacttgagtgagaagaagtaatcctaaacggttaatattgtacgattccatttacacagcattcctgaaatgacaaaattatagagatggagaaaaaattagcggttaccaagggttaaggggcagcagggttaagcagaggaaggaaaggagtttagctataaaatgattacatgaaggatatttgtgatggaaacattctgaatcctgaatgtatcaatgttaataccctggtttgcaagatgtcaccattggaggaaaatgaataaaggttacaccagatctctctatatgacttcttacaactgcatgtgaatctacaattatcttaaaatagaaagtttaattaaataaaattagggagaaaaaaatcagcaaatcatttaaaagcaatttgcatatatttatccattgttataacaataaaagaaattacctaaattgttatagtttaacatcacctaatgaattgttttccttgtaagtacttttaagacacaatctttacttaaatatcactgaaaacacttttcatcaaaaacatgacctttaggtttcttagaagtaagaataatattatctcagtgtttttcaaatcaacaataaaaaaatcttaagaaattctccaaacaaaagaaactcaccaaatttatactctttgacaacaaaaggcattttaaaagtaatacccatatttagaagtaaactagaaattataacattatcttctccaaatatacagttcaaaacaaattacttgtctaagtgcttaaaaaaaaggactataactgagataaacttttatatcaaggccaatacacaaataacttattctttaagcctaagcactcacctacaatcttcagtgtatattaatcaaacaaatgttcaaaatcaacctaaaattgatatgatgaaactgctatatttatcatattcatcagtatgaaacacactaacaaataaaatcttcaaaagtacataatgctgcctttaaaaagtttattcaatcattccagttctccttcactattaactttattaaagcccaactatgttattttaataaattatatttgtattgtttattgtagtatataagaatttaggattatggcagtaaaaagactattaaggaatttttttctttcattagtatctttcccacatacaaagatcttacaaagctattatgtaaaacttatataaattaatgcttcaaatgttttattaaagatctataaactaattctttcttaacatttaacattagataaattagtgtaatttactaaaatgaaagggattctttgaaatagtacaaagttttaacaacaggattactggataacaaacacaaagaacatgttgcttaatacctaaaatagttattgatatcaactattatttcaaagtatattcctgtcaaaagaaactttctcttacactttctgtgaaatttcaacttagttttattgttatgagaacaccatggcatagctttttagatctggctgctaattactaactatatatttttatcagcagcataattctcttaagtttgaactaaaaggaaaaaaaaatttaaggattgattaggttaatgaaatgaaagagataaggcttcctcacaggattggtgccaatctgcaataacttaacatctgaatctgtcactgctagctgtttccttggttttcaacctatgagaacagatacgagccaaaacagaatggaagagagacgcatacaatcaaaatgggtaatattaggtcatggcagctcagtatcagggctgcctctacgatcgtgttaatttcttgacttctcctcttcatttcctcatttataaaatgaaacaaaagcagtatctatatcatgagtgtgtgtgggtgtgtacgcactcagttgtgttcaactatttgcaacaccagggactacagcccaccaggctccttgtccatggacttttccagggaagaatactggagtgggttgccatttccctatccagggcatctgcctaacccagtgatgagatcccagtctcctgtctcctgcaatggcaggaggattctttacctaggcagcccaaataatattatcaaagcgttcatgaagactgatttgtgtagtgaaagtatataaccacttactgtccagtgaatattaaacactcaaatagtagcaattaacattgcttttattaaaattttttctagaaattattacctcactttaaatcaaatatccccagatgcaaaatatgaagaaaagtttcccctgaaaccctaaccctaaaattatccctcagaaaagaaactgcctcctatttgagatttataagtatatcaagaagcttttgtacaggtgcttcatttttaaccaaaatgtactgtttagggaactcattacactaaaactttaatcaatgctagttccagttgcttaaaagaagtcacaaaccccagggacaaaatgtcattaaaaataagacttaaaagattactttttaaaaacaggtaatataggatcacagggttctgcttctaataacaggcaatttgggataaatcttatagtgagctaggaaagaaaaatgaaacacacttgtttcaaggcactgaaaagctaaaagaacagtgatgaattacgcaggcaagacccagaagtagtggtaaacctagaaatctaacagttaaatgcttgcaattgtttctccacccaaagcgtgagttgttatatacataacaaaaatctgaaaggcctaaagagcttttagcagattcacaaaaattacagaagcaaaagctggtgatcaggatccaccaaaaagcaagatccctaactctccttaatctctggttttaagtcctgaaactctatatcctagggagttaaggtcataaaactgaagctcatattttaatcacgtcaatctagaattgaagtgaatgaatgaactcagattgctgatgccctgatcaagcaataatccacaaacaaaccaaaactaatcatccaaagcttcaaaactagttcaacaatttttcagaaagtaaggaaagagggcaaaaaagggggaagaaaaagcagtgtcactgagggtcaggatactgtttccatttgagagggaaagcaggatattaagtggaaagtgaggaattaggggcttctggtgaatacttataatttgtttcttaatctgagtactcattacatcagtgtcttcagtttgcaaaaattcatgaagccatttgcttctgacacatacacattcagttcagttcagtcgctcagtcgtgtctgactctgcgaccccatgaactgcagcacgccaggcctccctgtccatcaccatctcccggagttcactcaaagtcacgtccatcaagtcggtgatgccatccagccatctcatcctctgtcgtccccttctcttcctgcccccaaaccctcctagcatcagagtcttttccaatgagtcaactcttcgcatgaggtggccaaagtactggagtttcacctttagcatcattccttccaaagaacacccagggctgatctccttcagaatggactggttgcatccccttgcagtccaagggactctcaagagtcttctccaacaccacagatcaaaagcatcaattcttcggcgttcagctttcttcacagtccaactctctcacatccatatatgaccactggaaaaaccatagccttgactaaacggacctttgttggcaaagtaatgtctgcttttcaatatgctatctaggttggccataacttttcttccagggagtaagcatcttttaatttcatggctgcagtcaccatctacagtgattttggagcccaaaaagatagtctgacactgtgtccactgtttccccatctatttcccatgaagtgatgggaccagatgctatatattacctatttctaaatatgcatataagaaaaaagcaatgatgtgaatgtaagttttaaaaaacaaagacaataaagagagaagttaaaaaatgaggctattagacacaaattttcaagaactgagacctaactatggacaatatattcaaggaattaatgataagactgagccttttggtggggatttcaaccctgtctgaagaagggaaaggctaccactccagtagtttggcctggagaattctatggtctatacagtccatggggttgcaaacagtcggacatgactgagtgactttcacctgtattattatttttaaactaattcttttttggtcacactggcagatacgtggcatcttagtttcctgactagggatcaaattagtgttccctgcattggaagcgcagtgtctaaaccagcggaccaccaggaaagtctctcaacctcgtattatttttacagaaaagtcagattcacttttttatgtaactttgacataaagtgctataattttagcaaccaccaggacagatcagagtcaggatgatttatgctctctcagagaaaacagcccagataatcaaagatattaagtggcgcctcatactttgtatcttagataacttaaaacaactccaaaataatcattcttaatcaacattttaaatgtatggtggaaagaattttattttcaccttgccaagaaacattttctgttgctgtttggttaaacaagtaaggtaaacaagatacaatcagaaggatgcttagtctgcttaaaagtaaatatagataaaataggtttcaaagatcctgaaatctatagaaagaaacttccatttgctcaacttagtatactaattgtacatcatatatgaaaaaaggatatgaactaactctaatatatctttatgtgcattgaaaaaaatattttagaaatactttgtttctaatggaattgcttaactttttaaaacataccttctagtgtatttttatctagctattaacattatgcagcttcaattcatgagcttcctaggtggcgctagtggtaaagaacccaactgccaatgcaggagatgtaagagatgtgggttcgatccctgggtcgggaagatcccttggaggagggcatgtcaacccacttcagaattccttctggagaagcccaacgacagaggaggctggcaggccgcagtccacagggtcacaaagagtcggacacaactgaagcaacttagcacgcatacacacatgaggttttaattcatataaaacatctataaatttagaattaagtagaaaggccttccctacaaagctgcaacctaataaagcagttattaggtattatgtattagtaatagcagcctttaggtattatgctaagttctcattcagagtatattatgcatataatcttaaccatctgatctcctgattctcagataaaatatggcacaatttagaaagaaaaaatgttaacttgtatctttcatttgctatcaaagggcaggaaaacagaaaattgtttcagaagtgcctgcatcaaaaaaactttttaaaaatcaactattacatattgtttgtattgaggctagagaaatgaggtattatcacccatggggactttaatgggtattaattaaaacattttatacagtggcttatgttggcagtttttctaaacctcatgatcatttaaataatttcaccttttacaacaataaattactgattattacaaagagaaccatttaacagaaatctgatgtaaaaaaccagtaataaactgtaaaacctgctcttttgcaccttggaacatagctggttctaaaactaaggcagttaaaataaatctagatcattttagcaacaaaataatgatgttatcagttcataacccaaagaataaaataaatatctatgaatccatacttaggaaaataaatgactaataaataagtaaatgggagagaaaaggcaagtcttccttacagaaggatttctaacaataattatgctaataatgaatgagcactacaggcttaaaatacacttccatgtcaggatccatattcttggaatatccatattctgagatgatgcgtacctccaacagcctaaacagaagtaaacatggctccctacggaaaagtattaactgactcaaaaaggaactctggtaataataaggacacaaatacataaaatgtttgtgatgaaactcatgggtataaaaaattttatttataaataaagcttttctactattaaaatatccatacatgtagaaaatgaaatgatatacaatagacaaccttctccatttttctaaaaaactacacactcaactgaaccaaaaaaatggttaaatcccttacttggaaaatggagacagctttgtagttttctttaaagtaaagacagtgttttagaaatacattctgaatagatatgggtaaaaattatataataccttgaattgtatataaaatttgggacagaagtgggaagaggcttgagttaaagtgagagtagccatgagttgatgactgctgcagctagatgatgtatacgtgaggattcattagactgttggccctatctttgtgcatgctcaaatttttcaataatttaacatttatatagtgagtctgactcaagatcaaactataaagctacagtaatgaaaaccaagatagtgtggtactaatgaaagaatagacaaaggacttaatggaacagaacagggaatttcaaaaaaggcctgcatgaatatatatattaactgacttgtgacaaaggagcaaaggtaatacagtagaaaagaaatagtcttttcaacaaatggtgttgaacatcaacatgccaaaaataatcaatctagacacagacctacagcatttataaaaattcactcaaaaaggatcagtgacaaatgaggaacagcaaaccatacaattccagaatgcagcataggagaaaatctagatgaccttggtatagtgatgactcttagataccaccaccaaaggcacaatccatgaaagaaacaactgagaaactgaacttcattaaaataaaaactgtctgctttgtaaaagctgtcaagacaaagagaagacaagccacagagttggaaaaatatttggaaaagatatatctggtaaagggctgttatccaaactatacaaactcaactatgagaaagctaacaactcaattaaaaaatgggcaaaggatctgaaaaggtaactcaccaaaaaagatacatagtttcgggaagatatatagatttggaaagatccgctggagaagggataggctacccattccagtattcttgggcttcccttgtggctcagctggtaaagaatccacctgcaatgtgggagacctgggttcaatctctgtgtcaggaagatacccagaaaagggaaaggctacccactccagtattctggcctggagaattccatggattatggtccctggggttgcagagtcagacacaactgagcgactttcagttttcactttcaagcttctgaaaagatgttcaacattacatctaatgagggaaatgcaaattaaaacaacatagtagtgcacattcggagaaggcaatggcaccccactccagcactcttgcctggaaaatcccatggacagaggagcctggtaggctgcagtccatggggtcgctgagagttggacacgactcagtgacttcactttcacttttcactttcatgcactggagaaggaaatggcaacccagtgttcttgcctggagaatccagggatgggagagcctggtgggctgccgtctatggggtcgcacagagtcggacacgactgaagcgacttagcagcagccgcagcagtgcacatttgttaggatggccaaaatccaggatactgacaacactaaaagcaaaagaagttctcattcactgccagtgggaacgcaaaacagtaacgccactattaaagaaaatttggcagcttcttacaaaattatcaaatggttgagtaatcaggggctttccctggtagctcagatggtaaagaatatgcctgcaatgtgggagacctgggttcgatccctgggttgggaagattccctggaggagggcatggcaacccactccactattcttgcctggagaatccccacggacagaggcacgtggcaagccacagtccacagggcggcaaagtcagacaggactgagtgactaagcacacacacatgagtaaccagagtccttgttttatgccaaagcaagttgacactaaaatctgcacagctttacccgtaactgccagatttacagaggcaagcaagatatccttcagcagggaaatggatgaataaactctggggcatctagataatgaaatattatttgttcctaaagagaaatgagctaacagagacatgaaaagacacagagcatccttaaacccatattactattcaaggaagtcaatccaggaaggctacatagtggatgattctaaccaaatgatactcttgagaaaggaaaactatggaggcaattaaaaaaaaaaaatgattgccaggatttgtagcaggaagaggaataaataagcagaatacagaggatttttagaacagtgaaattattttataaactatcacaatggtggggtcaggtcattatacatttgtcaaaaccaacagaagggacaacatgagcaagccttaatgtaaatggtggacttcaggtgatagtgatgtattaatatatgtccatcaactgcaataaatgtactgctacagtggggaaaggtcgacagggaggtaggcgggcatagggagtataaaggaattccttgcattcttcaccctattttgctatgaacctaagactggtttaaaaataaatttaaaacaaatcttttaaaagaatcaatgagtttaatatatcttatttcataggaaagtaggtctccctccactcatatgtgctgaccatcccaaatgctaatgtaaaaatcaaaataaaactaacttttcatcatgctctagaacattcactttcagtaagagaaatgctggttacattcaatataagctttatgaagtccaaaaaaaattaccttttatttcataaagcatatttctggaaaggcacagtttataaatattatcatctatcctgccatctctttctttaattactatggtgttggcagtagtcaagaaagagacactgagtgtacttgtcttctgaattccaagcagcccacagggcactgcggctgctgctgctgctaagtcgcttcagtctcgtccgactctgtgcaaccccagagatggcagcccaccaggctccttcgtccctgggattctccaggcaagaacactggagtgggttgccatttccttctccaatgcataaaagtgaaaagtgaaagtgaagtcactcagtcgtgtcagaccctcagcgctagcaccaacttaagatctaaaccagaacaacacaatgtctgcactctaccgtggacacagactactacataatgcttaaaagctacagcggaatacatcagggcactgtcatgccatgcgatactcataacactactttaacaaaataccacagactgcgtagcttaaacaacagacatttatttttcacagttttctggtgaaaatccacttcctagattgcagctggttgccttctcactatgtcttcacacgagcagagaaagagaaaggaggcacgctctccagtgcctcttcttagaagggcactattcccatgatgagaaccccacactcacaacttggctgaaatctaattcctccccaaagtcctcaccgccaaatacatcacactgggagttaaggatttcaacacgtggattttgaaggacataaatattcagtccatagacaccacagcagtatactggaggggcatcatgcttgcaatgggtcagagttccctgacaagaccagagtgaggaggtgactggcagtatcataaatgcttcattaaactattcagtatgaatggcacacatttgctttcttttttaaagtccgtcatttttaagtttaatatttttctcaaaaaaaaaaaagtagtctctttcccctcaaattaggtctatataaaacaacagaaaacatatatactggtttgaaatattttttccttccttgaggtaactactacgctcttctcctgagttctaagacatgggaaagagcggccccagtcatttgaaaactaaccaatctcaatctcatgaccagataaataagataaaagtttcttgtgcagaatgccttttcgagtggttctcactcaatcataaactataaaataaaattaaacccaacttaggtaaaattaatcatgactcctcaaatattcactcccatgcacgtgtgttcagtcggtaagtcctaagtcatatccaactctttgcaagcccatggactacaggccaccaggctcctctgtccatgggattttccaggcaagaaaacgggagtgggttgccatttcttcctccaggggctcttcccgacccagggatcgaacctgcacctcctgtgttttctgcttggcaggcaaattctttaccactgggctacctgagaagccagccagacagatggatataaacacacgcatacatcactgattttcatttatcttcaaccaaaacaactcttgtagtatctcttataatacagttctcctatgtatgaattgttcaatttagttcatctgaaaatgccttcattccatctttatttttgaagaatgcttttgcacaatatagaaatctttgttgatagatttttctctcaacaatgtaaagatattccattgttttttagactccattgtttcttatcagcagtcagtcataatcattgtttctctgtatatcatgcattgtttaatctccatctgcttgcatggttttctcttttccttttgatttcagaagtttgactatgatgtacaaagatataactttttacttcttttgcttgggaatttgatgtgtttcctggatgtgtacacttgtttttttcacccttaaacttgaaattttttcgcttttatttcttcaggtattatttctattccattcactctttcctcttatttggggattttaattacaaggatttcatttcatattgttcacacggccctgagactgttcacttttctttatttgtttttctcttggttcttcagaatgaataatttctattaatctatcttcaggtttctcaacatttttacagctttttcctggctgttaaatctatctagctcctttgccatttaaccattgtgtttttcagcacttgtatttccatttctttctttcttatacggtctttatcctgttaagattgctcatttgttcactcaatgtatctatgttgcctttttaatatttttgctgtgtgtgtgtgtgtgtatgtgtgtgtataaataaaataaatgtagtaactgcattatttgtctgataatggcctcttcttgatgattatgtttctgttgcctactttttctcttgactattagctatatttttgtttctcatgtctgctgactttttcaaattgtattctgaatattaccaactacacactataaattcttccacatgttgcattcctctgacatgtactgatatttgttatagcaggcaatttactggtttcaaactccaaactgtctatcctaatgtggccagcaagtgaaatctctatttagttctcagcctcaggtcagatgtctttatactttttctattaaacacttctcatacaccacttcacatcccacttttctcatatttctaattacttcatattagccagaactgtgttgcatgcccattcctaaactcatcacctacaaagggaacgtacttaacattaactagattagcttgggctaggaagcgatgtggcttctgcaaagacacagtgctaaatccctgcagaaaatgtgtctgcaaggaagatctttttgaataggagtgtctgctggagacaatcaacagcatctgccacattctcccatccaagtactaacaagccccgaccctgcttagcttcaaagatcagatgagatcgggcacattcagggtggtatggccgtagactgccacattctctataccatctagacaacaacacactagcagaatctgtctgacataaccgatttagaactctgtagtgtactgaaggcttgcaatttccaggagaactgcagtaattttaagatatgtatcagaaacttaaagtttgttaagggctagttgctcagttgtgtccgactctttgcgacctcatggactgtatgtagcctgccaggctcctctgtccatgggatttcccaggcaagaataccagagtgggtagccattcccttctctatggaatcttctcaattgagggatcaaacccacgtctcctgcattgaaagcagactctaccatctgagccaccaggggatatcagctaaatgaaaaacagaatagaataaaatggactgtttaaaattaccacattattagattacataaaaccataattttctatgagaagaatatgctaaactactaagcagcaaaatcacaaaactgaaaattaaataacaggattgttagaagataaattcaatgttaatcagttattcctttatgctagagtaataagactaacacagagaaaataaataagattaacaagaaaaataaaaaaacacaggaaacaaatggtgtatagggtcaagaaaaaacaatgatataaatatgcatgacagaatgtcaaggagaaaagcacagtgaaaaaaggacagacatcagaaaagggcaggagaatgattcacatttcttagtgttttaacctttgcatctctcttcttaaaattcatttattaatagtacacgttccaagtcataaaatacttttaatactgtgaacatttgggggctccaaggtaaatatggtgagagaaagacagacttttcccaaatataaataatatgagggaaaaatattaaaactagaaaaaaatcagtcagtagaaagaaacaagaagagggtcacaaactactggcataaactttataaaaagttttttaaaaagacaagaccctacaaaaatacattcttcacttcttgagactgttcattaaggacccttgcctctcaatctggacagaagaaaactgaggggtttttcttttcatcctactgagggtgacgtaaggtcacgagggagattcgtagtggaagtaagtggtaaggaaaagtaagtgggaaggtaaacagtaaacccagcaccccctaaaagaactaatactgtccactagaagagtccaataatactgtccactagaaacttctgtgataaaggaaatattttctactacactattgaatacagtaggcaccagcctcacatgactgctgaacacttgatgtgagtccagtgcaactgaggaagtgattttcaatttcagttaatttaaacagccacatatagctagtagtgactgtatcggacagcagaattcctgggttaaacaataataacaagaacaacttacaggctaagaacatttcttgaaaggaatatactgggtgatatcaatgatagtataggtcatttaagaaagttccaaagtaagtgctcaattttcctaaaaatgacattaatctctgttgagactgaatttactatctcacaagttattcctttcccaaaatgccataaggctacaaaaacaaagaagaataaggcataatcctttatgctagagtaataagcacacaataataagtaataatcccttatgattcatacagtggaagtgagaaatagatttaagggactaaatctgacagacagagtgcctgaagaactatggacggaggttcgtgacattgtaccggagacagggatcgagaccatccccaagaaaaagaaatgcaaaaaagcaaaatggctgtctgaggagcccttataaatagctgtgaaaagaagggaagcgaaaggcaaaggagaaaaggaaagatatacccatctgaatgcagggtttcaaagaatagcaaggagagataagaaagccttccttagcgatcaatgcaaagaaatagaggaaaacaatagaatagaaaagaatacagatttcttcaagaatattagaggtaccaaaggaacatttcatgcaaagatgggctcaataaaggacagaaatggtatggacctaacagaagcagaagatattaagaagaggtggcaaaaatacacagaactgtacaaaaaagatcttcacgacccagataatcacaatggtgtgaccactcacctagagccagacgtcctggaatgtgaagtcaagtgggccttcagaagcatcactatgaacaaagctagtggaggtgatggaattgcagttgagctgtttcaaatcctgaaagatgatgctgtgaaagtgctgcactcaatatgccagcaaacttggaaaactgagcaatggccagaggactggaaagggtcagttttcattccaatcccaaagaaaggcaatgccaaacaatgctcaaactacttcacaattgcactcatctcacacgctagtaaagtaatgctcaaaattctctaagccaggcttcagcaatatgtgaaccatgaacttccagatgttcaagctggttttagaaaaggcagaggaaccagagatcaaattgccagcatccactggatcatcgaaaaagcaagagagttctagtaaaacatctatttctgctttattgactatgccaaagcctttgtgtagatcacaataaactgtggaaaattcttcaagagatgggaataccaggccacctgacctgcctcttgagaaacctgtacgcaggtcaaggaaacaacagttagagctggacatggaacaacagactggttccaaataggaaaaggaggacatcaaggctgtatattgtcaccctacttatttaacttatatgcagagtacatcatgagaaacactgggctggatgaagcacaagctggaatcaagattgccaggagaaatatctataacctcagatatgcagatgacaccacccttatgacagaaagtgaagaagaactaaagagcctcttgatgaaagtgaaagtggagagtgaaaaagttggcttaaagctcaacactcagaaaactaaggtcatggcatccagtcccatcacttcatggcaatagatggggaaacagtggcaacagtggctgactctatctttcggggctccaaaatcactgcagatggtgattgcagccattaaattaaaagacgcttactccttggaaggaaaattatgaccacctaaacagcatattaaaaagcagagacattactttgtcaacaaaggtccatctattcaaggctttggtttttccagtagtcatgtacggatgtgagagtaggactataaaagctgagcacagaagaactgatgcttttgaactgtggtgctggagaagactcttgagagtcccttggactgcaaggagatccaaccagtccatcctaaaggagatcagtcctgggtgttcattggtaggactgatgttgaagctgaaactccaatacttttgccacctgatgtgaggagatgactcatttgaaaagaccttgatgctgggaaagattgagggcaggaggaaaaggggacgacagaggatgagatagttggatggcatcactgactcgatggacatgggtctgggtggactccgggagttggtgatggacagggaggcctggtgtgctgcggttcatggggttgcgaagagtcggacacgactgagtgactgaactgaataagcacacaataaaataacccacagtcagactgaaactgagaggaaaaaacaaatggtctttggatatggtgggacagaataaagaagtcacactatatcagaatgaacaaaatgtctgtaccagcacttcccacgtagctgcaacaggagaagagcataattactgtgcaatacattcatggcacaaaagaaaaaaagtacaaaagacaaattattctgtaaaaaaaattctccatatctcaaaagaaattctctaacaagttagtaagaatgtgaactcaaaaaaaaaaaaaaaaaaaaacctcatatattcaaatcacagaataaaggaaagagtgaaacctgagtaaacttaaaaatgaaagcagtatcattaccaaattaagtaaaaattttaagtaacagactttcaggtcactgaaaatcaaattactaacactcgcacaaaagactggatatgtatgaatgcaaataaaaaggcaaactttaaagcaattatttatagaggtgacagacagcagacaaaagattataaaatagaaaaatttgtattcctgaagcataaaattgacaaggagtaggaaaagagtttgaccatcaaattaaaaaactgaaacataaaaagacaattccctaaaatataggaagaagtgaatatacagagcatatagaatgatccacaccgaagatgcaaccttgctaatcctctaaatattttaagaaaaaataaacaagcaaaaaaacatctttttgaggattcaaacaaacaaacaagaaaaaatagagttacctgcagaaaagaaaaatctgtgactacagagctctcagaacgtgtgacccaacagtattacatctgtccaagaagtcaagtgtaaaagtaaagacatttcaaagatagaagacataagagaagactgacccaagagtccagtcaaaatatcgagcgtgacagcaatactgcaaaatcttgaaattttctctctcatctacccatcgtgctccgttccggaagaccaaaaaagaagacagtacagacaggaaggcctaagaaatagaggatttaacacagaagagagaagaaattaagttccacaacaacagctgtgtagcaagcctagaaagcaatcagattagaactggaggatacagagcctccaggacgtctcctggaagagtatgaagttattggaagatacgcaacaacggtactgactagaatgttcacatatgttcatatatgttcatacatatgcttcagctatatgtaacagaactatatgttcagctatatgtaacagaattatcaagttacccatactgaaaactttttttttttctttcaaaattccagagtgtggcttcatcttcatgcctgccaaatggctgctgtacttgtattcatcacacatacattccaagaagaaacaatgaaaaaaaggcaaagggtaaaataaatacatcaagtaagtctgccaggaaaacaatggctttcctagaatctcagccagaatatctccacaactatttcaatttctccaactggttcatacagccatttcttgactccagaggagtttgagaggaagctggttattttaactggatatattgctactctgaacaaaaatcaggattcttttatttagaaagtgaagctggagagttgatatttggtaggcaactggtagaatctcaataactgcatataaaataatatttggagacgatttaattttctgatggagaatgtggtgtgctttgtaatagtgacatgataaactaggcaatttcaattccagaagggagtgccaaagaacattcaaactaccagaaactgtgctcatttcacatgctggcaccacatatatgaattatatgtaaagatatatttaatgtatatacataatatatatctttatattatatataatatatatgcatgatatattatatacaatatatatatctttacatataatacatatacatatggtgctatgtagcaccatatatagcaccgtatctatatagctacatagcaccatatatatatagatatatatataacttagaaatggagaaagttaaatgcacacaaatatgaaaaagcctaaacgaatttgaaatagctgatacaggcatgggaaaaagtgggataggaaaatgttgtttcttgtaagccttgcagtactcttttaaccatacacgttacttgaatacaattttaaatgtttctttagaaaagaaactatgcacgttttaaaaagccaaacaaaaataaactataaacaacaaaaaaaaaataagtaatctttaagaaaaatgctccataaccaatgaagggagagacagagacctcatttcaatatcagcacgtggtccacagtttcccattaaactgcacactgaacccttccttcctcaatagctgtctgaaagagtgagcaaaaaacttttaaaagtgtgttgtaaagcatggattctaccccaagtcttcaagcttttgttttttaaaaaatccacaggataccaaggaagattcaaacacagcccactagtaaaacaaaatacaaaacttattttacaaagaaaattaacctgtaaataaagtttaaaaaataatctctaacactcaggttcctctaaaagaggagctagatgtggagttttgaattttccccccaaatatcttcatacttgcaaaaaactgctaatcaggaagtatgtacatgaactttgtgttctgatgagttcttattttatagtaaccctcgagaaacttaagaaacctatcttaaaaatattttaaacaaaactgtaaacttggaacgttcttacacctatgtaaggttttacaacttaagtacagatataatgggaggaagaaaagtaaaattatcacttcgaatttcaaacgggaatatgtatttccaccagaatttattatctggaatcatatactaaaaagtaactgtgaacaacagaattttaagttctaaactagtgaagtaaaatattttgataattattgcaaaaaccaccatcatctcctaaagaaagttcaattttaaattcacaaaattaaagacattcttatcaggcccagtgacatgagtttcacttcagtctgtaactaatgccacaaatatttttttttttaatcacttaaaatttacttggtgctttataacatttattttaaaaaatctattacttctacaaaagcaattttagttagagacttacatcatttatactttcactcttctcctacaataagcttgaacgctacaaagacatttaaataattttatacccttgaaaattatacaaagttgacctagaattaaaaagaaaaaagcagccacttggactgtaaagagtaaggtaaatttaagaaaataaaaatgcaaatatgcattttagcagtcccttgaatttattaacctaaaaggtttaatttccattttcctgcatcagctgtatttataaaatgtcgtgccctataaatatgctgttattttctatagtcaagcaccctcttaacaaatcttctcattaatatgtaaatttaaagtcaatcggtcttctccctgacagccccatgaattcctagtgcactgtataatcggctttgacttggcatccactatttatcatcaaagatgtcagttagaaaaattatggaaaatgcactgcaattgatatgactgcaatctactttgtcaacacttaattgttctgcaaatcatacatttacatataaacagcctaaatactgatctataatgatgcaaataaactaaattaaaaatcgcttctgcccctgaagaagcttgtttgtatatgatgtgttcatttgaggacttactaacaaaatagcatgtacatcagtccatctcagaaagtacttctaattttcaattccttaaaacaaacaaaaaaaatttttgctacccttcaagcatatgaacataaacaaatgttttaaagaattcaatgagaaacataatttttctctttgaaaagcaaagttaattatggttgttagctaattgtaatgtttgagcactaaggattggggaggggggtcaaaattagctttgactagaacagggcttccctggtggcttagacagtaaagaatctgcctctaatttaggagacccgggtttgatccctgggtcaggaagatcccctggagaagagaatggcaacccactccagagttcttgtctggagaattctatggacaggggagcctggtgggctacagttcatggactttcaaacagtcagaaacttattaaagtgagttaaaaaaatattttagaagtcatgagcaaatatatataaaggaatgaattacgaaaagactgatttttatctcactatgtgcttcgactgcttctataattttaaaaaatacacaggattgtagttagctacacccttacaaatgttctatttaagtggttttctttctttccatttcttaagccaaggagcctttctcaaaggaaatcatacatataggtgcttatgaaaggcaagcaaaggtgaagctgctccatttggaatggtggcaagattcccaggagtagcactgcccaccctcccctacaacccctgtggttgctcccaaagcagtcttcctgaggagagagctgcagagctggcaactacaaaatatttcaactaacctacagaatttagaatgatgccaacgtcagactgcaaagaagtggcaaagaaatgaggcagtccaattccagtgcacccagaacaacgatcagatgtttgtaaaaattgatgttcacacagttacacatgaaaacacaaagaatgcaccacagtatcaatttctaaaattatctgtcaaaagagtaaatatacatggcagtgtagattttaactgctgggcttttgaacagctttaataactaactttacctaaaataaaataaaattcaagaaacacagacaattacaaaaggagatatttgaaaatctatttttagaaggtaagaaaaatacatttttaaaaattctagattctacataatgatacatagctactgaaaatgatttgatgattacaggaaattaaaattaaaaaattttaaatggtgacaaaagctaaataagataaaataacctataatcttacacaacaggaaaaaaaaaatatatgaatagcattctggaaagtgactggctgaaataaaacagatagctatagctattagcaacaaaaaaatctctcttccaagttaccactgacagaaaagggtcaagacacctgcagcatggacatgctgcttaatccagcaaaactgccttcaaaattttactttgttcgaagctaaaatttcatcaatctaagacctgtatgtgacattagatgtttacatatgaatagtttaaaatctcctttgaattttaagtagaataacctaatcaccttttaaatattaaaattaagatgaagtcaatattacaagtagccttctggttaaagatatattttttaaaaacttaaatactttttaacagtaacaatacttggtaaatgcagaaacgctgataaatattttaaacatttaagcttcttaaatatctgaaaactggatacatcacctaaagcaagaattatgaacatttttcccttttatatgtttttctctcactttaatattatttctaattaacaaaagcaattagtactgaacattctacaaagcctattcataagcttgtataaaaaccactgtgacataattggttggtaatctggtattttactttccattctgtttttaaaatctgtaatactgctttttaaaaagacaaagaaatatcattaagtacagaatgaatgcaagtgctattttataatatttagtgatttctttaaacaagttatagtttacccttaaatcttacatatatactgagatctctattgcaaactatgtagtaaggttttctaatttgttaatgtaacgaaaaaagtaaggtatgcttctaaagttcatcggcaccaagaaaacaccttcactgtaaggtagacttaattatcaattttactaaagttctaccagcttaagtgaaaaaaagtaaaacaaacattctagaaatataaaactaggaagaagtagttgagttcacaatttacctgtaaaggtgtgaaattatctttggtataaattcacgtatgttagaatcacattatctactttttacaagtgaatgcctggaatagttgggtctcaaaggtatgacactaacaaccaaaaaaatccacaatttggcaacgtcactgtcaacactttatcgagctgctgttcccaacaagggcctcttgccaggcctcataccaaaagtttattcactatgccattaaacatgcatcagtcagagccaaaacaatgaacgattatcgatgcatttatactggttttctgctttccaaaagaacgtgaaaaaaattagtcctccttaaacatgcagatttttatactttcctagtcttagatctttgtacacattttagaaaccgcatccattttcttagtatactgtgtaagtataagattattcaacacttacctctttccaaggactgacaaactgtgtacgagcatatcgagttagcatgtggattatgacaacctgtccccactcttctacatcaactagtaaattacatagtttgcggtaattcttgtgaatgagatctattctatctgggcaaacttcttcaaatgccatgacaacactgccagccaccaactagaaaagaaagaaatagtaactcattaaaaaacgttttcctacatcaaagattctactcaggcattacagagacgcaatcagtgttatggcaatcagtatttattcagtcacttgactaattaaatactcatgtttgaataacaaataaattttgaagagtcactgcccaaaagaataatattgatagctgaaacatatctgaaaagctaacacttagaatcagaagtattagtattagaaattatatttcttatttcatcacattaaatttcaatggactgttcatacatggattagacatattaattatgggcagttttcatttttaaagcttacccaaactctaattactcagtacaataacaaagaccatgtcatgtcagtttaaaatgagaatgacaatttcaccatgttgttcagtcgctaagtcatgtctgactctttgcaaccccatggactgcagcatgccgggcttccctgtccttcactatctcccggagtttgctcaaattcatgtccattgagtcagtgatgctatctacgaagaatctatcttaaaatgtgtgctgaactcataaatgtctttagaacaaaaacactttcaaatcttacatattttaatcaacctgttaatttctatcaacattatttacaagaaatactggctacaattttagaacattattattatttatataataatatatgtaagttgaaataagatagtaccaataaaaggaagcttttctccaagaccatttaattaaacacaaatgctgtttttggaattgtcatgtttttacaaagtgatgaaattaagatttctttagtataaaagacacaagctaagcagaatatataataaacaaacacttctatatatgtaccgctgatatgtttggagttagccaacaatataatacagttttgaaaaaataaattaatatcatattctttctgaacactagggatcttcattttagtgtctaaaatttccccaatgtcttaaaataagcaattaaatagaaataaaacttactgaaatggtactttttgaaaaatattagatacagtggtattcatatttttattgtttgtccctctacttggctgacatttagtttattaatatgcaaccaacaatacaattgaaagaaaacagctcagaatatagacttgctattatgctaagcaagtttccagtcctgtggggattttatgaattaccaatcagtataaacgtggagctgcatttattgactccagccctgcccaagtactggtgcctgctggtcccagcatgtatgcacctcaatcgaaaaagcgaagaactgattatttgtgtgaactaaataaaaatgtattatacgtataattttctgtttgctattgatatgggaaggaagttatgtttgtgttttcaactccacattttgatgtcttctgtacaaatcactcttcagtaataatatttctaaaagatgagaactattatcatttaaaaatctcttaaaacaactaagtttatgacatcaaactatagaagaacatggtatttgtaaaacatttatatttacatatgttttatattgtcaatcatcttaattaagctatatttttttaactggttagggtgttaaagaacaaaaatgagtaatatcacttagaataaactaatatatgagaccaaaatcggaattcaacaaagtttgaattcaaggaatactatgtaaaatcaagttattttgcctaaacctagagattatttttttcaattctgtttagacaccaaacaattaaatggaaaatcggctcccacatgctactaaatttatagacctacagatataaaatagttctacagaattaaccaacaacatgaaaattgaaaaaaaataattgtttaagttcaggtaaagtttatggaaacacaaaagtaactaggaaaaatattataaaatcatcttttttctaatgattttagatatttcattcatcatatggttttaacagttgaccccagcctaaacactgccagaagaattgataattctggtatattaaatgttcaatattctataaaaacttacaggattaaaataaaatgatctactgagatttgaaaaccaaaaatattggtttccccaaaacagacagttaatttccatttcactgtgtcaatagtagctttttatataaggggaaaaataaatcactccaacaaaactagcaatgagctcatcaaattcaaatgcagttttccatttatgtattttttatattaaagcaataaacatggttcatttatcttcccttggttgccacgtttttctgtgctgttgctatgaacttcagccattagctgtgctccaaggtaaactacatgaaccatcaacaaaagtgacactccatctatggagttcatattttctccagattatctatgctagttgacaagctggtaatgaaaaaaatcacactaagcaaatggttcctctaataacaataaattttctataaaattatgaagggtacaaaacgtttccttgcatctattttgtcatgaattctaattaacgttgggaaaacctgagagtgctgggtcatcacaagaagtgcattgaggtttgattgataatatggtgcaagttggccagtgctgccaagatttccttctattaaattaatggccatccaacctgccctaatcatacagcccaaatgatattccccctcttatttcaattttcttgaggcatggaaaatgggaaagatcggtcatttatcttctaatagctggataatagatctatcacaataaaacatctgcacaaactcagaggtgtgttttttgcccacaacagtgaagcttttaccaacattaaatcaataacttaaaaaatggagtcttacccccacagcttagctatgaactaccgatatattcattaaacatcattttgtagctaaattaaggagaagaaactttgtcaccaaaaaaatataaataaacaactcaaattttcagtaggcactgatctcatttgttttcctaagaagccattttctattagaaagttaaacgctacaaaaggatttctttaaaattaacctgaaaggaaaaggaaataaataccactttgcttttgaggtgttctaaataaaagaaagaaggttcactacaaagcttaaattgctcaataaatataaatttctacattttaaagaaaaacgagaaagtgttataaattttaaaaaggaattttacacatccaaaaggttttcagtaaagaaaagtgtttaggatatgttgaatagagaaaatatgatgaaaacggtaaatctaggaaaatacaataaagaaattatattaaaaaaaatgtaacagttgactgtatggtcaagcataaataaaaatgttcccttaattgcactgacatggtagctcttattatatcttttaaaatttacagatacagaccccatggacttaacctaccgggctcctctgtccataggattttccaggcaacagtactggagagggttgccatttccttctccaggggatcttcctgacccagggattgaacctgggtcttccatgttgcaggcagatactttaccatctgagccaccagggaagcctaacagataccttcagacaatagttatctaagtaattctaagatgtttttctagttacatcaccaaaactgtatttctaaacccaaagtgacttattttggggaaaggacttttcatatgacaaatatacatatttctctggtaaagggaaaaacatttctattttaataggccttttatttctaccttttcttaaaatcagaatgacacaactaattttgaaatctcaatttcaagaaaatcttcttttagactaaaagaagcaatagaaggtagatctcaaaatcaacagatattaaataaagttcttaaacatattaacacctttcaaaattatatttatcagcagcaagagcaatgtcatcatcattatcatcatgatccccaaaagctcctgctgacagcaaataaactccttttaaaatgtggaaacaaattaaatttggatcatttaatgaggaaattttaaataaaaatgatttaggttttttattttaaatattaatagtcacactattaattagtggggaagaaatatagctatatcacttcaatatatctggtaagaaaaagtaataataaacataagatccataaatatctatatagatatcataatgttttcaatctttttacatcaaattataagcatacaaaggaaaaaataatcagaaaacattcacaaaacataaatacttaaatactgggtagacaacttaaatactgggtagaaagttaatgctacctggggaactgtgaatctcaacgcaaagtcagagaaagcaaaaagattaaaatcaaagctctaagcaacactaaaatactttggaatttccaaattttaattacatgtaagtagaaaataagctctaaaatcagagagttatatgtcatgtatgtatcacaaaccttacaaagatctatgatagtctgaaacaactgcccagaataaaagcagacatgagttacaagtgggcataagagagaactgaaagcaagcagagagaaagagaggagcctatgagtgaaaacactaaaaaaaagattcctggtagatcagagcagaagatgaaaatcaaaacaattgatgaaaattatccacacaaaaaaatccatgatgaagcaaacaaacaactctcacgcaacacttcaaaatgaattaacttgcctcaaagaagcatttcaagatcacgtaaatgaacagaaactgaaaatcacaaaacagaaatgaacaaaagacaaaaggaagaaacagaagttgattgaaaccagaaaagaaccagacatcttaattaaattgcaaaatgccccagcagaaaatagttgaataaaaatttaggaaggggcatttaattaaagtacgaaaagaaccaagagaaagaacgtgagataaagaagtaaaggcagcaaagaagatccagcttagagaaaactgaactctctgaagaagaaaagctaacagctgaatagaagcaatatttaaaacttaacagcaacaacaacactttgccagaaataacataaattctaaatctatattgtaaaaagcctcactgggtaccaggaaaaaaactgaccttgacacaccagaaaaaactaaaagttaaagagaaaaaaaatcctcagggtcagcatcttacttaatacacacacatgacaggcatttcctttaaactgaaacaaggtaaggatgcacaccatctccaccactactgaacaatgtactaaagttatacaccaatataattaattatgacaagaaaaattagagtcataagtatcagaaaagagaaagtaaagttatctctatttgcaaatgatatattttctggaaagaaacaatggaggttgaaagataaaactaaatcaaacaataaaagaattcagtgaagaagcaaaatataaaatcaccatacagaaaatcaatagctttcttctataccaatgtaacaagttcaaccatacactgttaatgtaatttcgatttacaacagcattcaaggaagtaagggtaatgataaacgtaattctaaaccaacatttaactcaattagtagtccccatctcactactcttcacagagtacaagctggcaattctgaaaaaatactttatcttccttccaggactgagcaagtaagtgtactggataatgtaagtcacatttcttaatgttggaaaaggaagttgcaaatattgacatgaaaaggtaggacactggaaaaccgtgtgcttctgctctggaattacagaattcagtataaactgaattcagaaaacagaaatttgcttttcttttctatcatatttcatatggatagaagtttctatccatatgaatcctgcttcatatagaaaatagatgtaggttcttttctaattttttaaaaataaacatatcctatatatactttaggataggtagtacctcacaaatgacaagacagtcaaagctccccaaaggacctatctaccaatgactggagcatgacacacaccatttgggaagtaaaacattgaaaataatagtaaatacctaattacctgcaccaagaatatagcaaattaattctcacaattattcaacacatcttaaatatctactattaatgagtacaatatttttttctattgtattttggaaataaatacaaaatacagggtcagaacccaagaacagacattctaaatttacaaagaaagtgtattctttatattcctttttgagtcgtttcttattaatctccttttatggtgtcaggcactgcgctaaggattttatatacaataactttctaaacacaaacaaaaactttatagattggaaattataaggcctaaaaatttggaagctgaaatttatgaaggcttgctgctgctaagtcacttcagtcgtgtccaactctgtgagaccccatagacagtagcccaccaggctcccccgtccctgggattctccacgcaagaacactggagtgggttgccatttccttctccaatccatgaaagtgaaaagtgaaagtgaagtcactcagacatgtctgactctttgtgaccacatggactgcagcctaccaggctcttctgcccatgggatttcccaggcaggagtactggagtggggtgccactgccttctccatatgaaggcttaatacatagctattattcagttgcttaagtcgtgtccgacgcttttgggactccatagactgcagcctgccaggctcctctatccatgggatttcccaggcaacaatactgcagtgcactgttatttccttctccagaagagagggggatgttctctgcttctctaggggaacttcccgacccagggatcaaacccgcctttcctgcattgcaagtggattcattacctctgagccaccagtaaagcccctaatacatagctaataagtggtaaaacttcacgctcaaatacaattctgtttaattccaaagaaggtagttgttacccgtggcatgctacatcttgtctgagaagacatgcacatattatatatggagatttcatttctaggccaagaaactaatttatttaccttattatgtagcagaaatcatggcaaactaccttaaaataaaggatctgtttcttacagatcttagtattcttcatagtagttggcaagtgtcttcaagacagaagaaactaaatgtttttttttattattattactaaaatcaagttatccacaatatcaataatattgattttgtatttgggtctggaaggatataacaagtgtgccatacaaaagacaaaaaggaatcaaatttcttttctctatcttcattatgccaaccactacagaaaaaacaaagattcctgctacattattgactaaaagaaatttgctgtctagtctccaagtacagtctcaagtaaatacattattttcaaaaatacatagtgaaaaagatcactaccatatacagcatatacactggatttttttaaaaaagtaatgaagggggaataacaaacaaaaaaagacatgagacatagaaaaacataatggcagctataaattaactgtattatagtaagaattaatgtcaatggattaaaccatctaaacaaaaagcatatgtagtcagaccagagtaaatatcaagatccaactttatacagacctcaggagacacacattagattaaaaaataccaacaggttgagagtaaaaagaaggaaaaagatatattatgtaaacagcaattttaagaaagttgtactgaaacaggacaaagtagaattttaaaattgtttatgagagattgagacattttataatgacaaaaggaaggtaaaaacaattaaaagtacactctgcttatttaacttatatgccccaagtacatcatgagaaaagctgggctagaggaagcacaagctggaatcaagattgccgggagaaatatcaataacctcagatatgcagatgacaccactcttatggcagaaagtgaagaggaattaaagagcctcttgatgaaagagaaagaggagagtgaaaaagttagcttaaagctcaacattcagaaaactaagatcatggcatctggtcccatcacttcatggcaaatagatggggaaacagaggaaacagtgtcagactttatttttctgggctccaaaatcactgcagatggtagttgcaggcatgaaattaaaagacgcttactccttggaaggaaagttatgactaacatagacagcacattaaaaagcagagacattactttgtcaacaaaggtccatctagtcaaggctatggtttttccagtagtcatgtatggatgtgagagttggactataaagaaatctgagcacagaagaattgatgcttttgaactgtggtgttggagaagactcttgagagtcccatggactgcaaggagacccaaccagtccatcctaaaggagatcagtcctgggtgttcactggaaggactgatgttgaagctgaaactccaatactttggccacctgatgcgaagagctgactcatttgaaaagaccctgatgctgggaaagattgggggcaagaggagaaggggacgacagaggatgagacagttggatggcatcatcgacttgatggacatgggtttgggtagactccagaagttggtggtggacagcgaggcctggcatgctgtgtttcatggggtcacaaagagtcagacacaactgagcgactggactgaactgatgcaccaaatatgagagttcctaaatatacaaagtaagcagggacagaactgacagctctatagttaacagtagacttcaatattccacttttaatgagccacaagaaggaagatcaacaaagaacagaagacctgaacaacactataaaccaattagacccaaaagacatctacagaacacgccatccaaaggcctgctgagtatatattcctctcaaatacacactgagcattctccaggacagaccgtataccaggccatatattaacagctatagtctggcttcgctggtggctcagatggtaaagaatctgcctgcaatacagcagacttgggttcgatcactgggtcgcgaagatcccctggagaaggtcatggcaacccactccagtattcttacctggagaattccatgagcagaggagcctggcaggctccagtccacagggtcgcaaagagtcaggcacgtctgagcgactgagcacaatacgaggttgctgctgctgctgctgctgctaagtcgcttcagtcgtgtccgactctctgtgaccccatagatggcagcctaccaggttcccccgtccctgggattctccaggcaagaacactggagtgggctgccatttccttctccaatgcatgagagtgaaaagtgaaagtgaagtcgctcagtcatgtctgacactagtcatgtcgctagtggctgctatattggcttctataaacagatatgcatgcaactgggtgatatcttcctaaaatgaactggaatccttttttgaacagttttgagccatacctgtgggtgcagagataccaccaaaaggtaccattacaccagctcctccagaggtctgctcatagatcccatgcattgccattatttctagatctcattatcatgtcactatacataaagaataggactgggataggaaggaggaagagacatgtacattccccaaagatggggaatttgctgagtaagaccattctaaccagccaataaaacagtgttatacatatgaaaacattttagtatccaagaaaaaaaataatacattcataatactaaaacacactcctctatttttcattatctctttaatactgaatacattataaaacaattatgttttcaactgattcagcctttaaaaatcctagtaaatcgctgtttaaaataaaaaaaaagttggccttaaaagcagtcaacaatttagccacaggttaaagaaagaattgtctttccccaacttgctcttcttcagactctcatgaagaaatatgtaacaaactacaattccaaatggaacttttctctttacctggacatttttatttttcaagattttaatgagctccattaatatttatataatttcaaaatctatttgttgttctgtcgctaagtcatgtctgcctctttgcactacatggactacagcataccaggcttccctgtcctccactatctcccagagattgctcaaattcatatccattgagttagtgatgctatttaaccatctcatcctctgctaccctcttctcctttagctctcaatctttcccagcatcagggtgttttccaatgagttggctcttcgcatcaggtggtcaaagtattagagcctcagctttagcattggtcctttcgatgaatattcaaggtttattttctttaggattgattggtttgatctccatgcagtccagaggactctcaagagttctccagccccacagtttcgaagcatcaattctctggcactcagccttttttatggtccaaatctcacatctataaggactactggaaaaaaaacatagctttgacaatacaaacttttgttggcaaagtgatttttctgctttttaatacattatctaggtttgccatagctttccttccaaggagcaagcgtctttttattctataagaattattatatcatatatatgatagtaaaataattatgtaaaaaagcacaattttactggacatgaaaagatattacttactgtgcttttatccttcagaagtttttcaattatttcaattaacatttctttctgctctggatcaaggctaaaatataaaaagaaaaaaaatttatattaattttttccctttatttctaactttaagtgaggctaatcatttcaagaatatgaaaaattttttaagttggggggagaaacagactttagatagaaataaacagaaaacaaatttaaagtggaatgagttgacttttcctattctatctaaagttgctcatgttaattaaacccagatatcaaaaccattaagaaaatagttaaagaacaaaaccacttcctaaaatgaacttgaaaaccttaagaaagtaattatagttaaaccacaaaatcttttttttaaccaggtggaaataacaaaacaggaatcatttttgaccatggatacctaactgtcaaaaagaaacacatagaaatttccaaataagaattctatatcattctggtttactgatggagacatgcataataaaacctgccatctaaaaccaaaaaggataaaggctcagatatgtatagaaatgacagatgcatcgtaatacgagctttacacaccgaaataatttcttcctagcacagaattcaatcgttcatttactgagaaactaaacaacaggcctacaaagagaaggaagacaatccagtacacacagccccagatgtaatcataagacagaatggagatttggatagaggactctggggtaggggacactgatggaggcaggaaggctgtggagggtttctttggggatgtgacatctcagatgagtcttaaacagctttacatctggaaaaagtaggaaatattctaggcagagactaaaaaaggatcaagagatggtaatgagataagaagcattttatggagaggactaataggcagtactgagctactagactataaattcaagtcagagagaggtaacatggagcccagtgatgggcttttaagctgtcatagtgagctttgattggagaaggaaatggcaacccactccagtgttcttgcctggagaatcccagggacggcagggcctggtgggctgccgtctatggggtcgcacagagtcggacacgactgaagtgacttagcagcagcagcagtgaactttgatcttattttgtaagttaataaatagaaaggataaagactacgaagcatgagttgactttgacaattaacctaagaaaatgagtttcacttttcctaaacattatataagtttattattgaccattataattatctgatttataattaccctggaggagggcatggcaacccactccagtattctagcctggagaatcctatggacagaggagccgggtgggctacagtccatagggtcacaaagagtctcactactgaagtgactaagcacataattatctgaacactcaaaaattttaattgtttcaaattccagctccattctcccttctctaatctttcctaactaatcccatttctattttaagaaaccctatatgacaatctctgagctctaccctatcaaaggcactgtcattgttcctttatatatacataagacttccctgtagctcaaacggtaaagaatctgcctgccatgcaggaaaccagggtttgattcccgggttgggaagttcttccggagaagagaatggcaatccactctagtattcttgcctggagaattccatggacagagaagcctggtgggctacagtccgttgggtcgctaagagtcggacacgactgagcgactaacatacatacataacatacagattcattatttagcaataccttactcaattatagactgctttaattatttggcatatgtttgattatttcccctcaaaatgtgacagtacatcctctaatgttttcatacatcttatgcatatagcaccacaccaaaaacacaaaatgatcttgataaaagctcgtgaagtaaatggtaactgaaaataataccaaactatgaaagatgataaatcttttatataagcattatatagtctacagagataaagttaccatatatatatgtatatatatctatcagtatatataattataccatatagaatatatatatcacataaatatagtatggtgctatatttaaaaatcagtatttaaacagtatttaataaaacggctctggaaaagaagcaggcaaggaagggaatagcaggaccaaagatggatgaaagggtaacaaagtgagcagagaagataacaagctttagactctaccctacaataaataggaggaaaaaaatcttaattttctaatcacatacatgtatgtgtaatgagaaaaactgtataaatgataattcagtatctgattatttttcagttataaaatatcactgtccctaacaggctcacaagtagaaaccctgcaaaggctcccaaaataaccaaaatgaaacagaagatgtataaagaatatttgtgggcaaggggaaagaaacatggtcattgagtttacttactcagtttaaggtcagactattatatgagcgaataaaatatgcctccatgggctttaacattccatgtgacattagggatctttggtattatttataaagtaccaacctgtacagtttttgtattgcatgggctgcatttttcctaacgtatggtgataaatcagcagaagcttccttaatggcaagcatcataataggtacaataattggcactctaatacttgacagaactctcaaagcacttgcacgaattagttgatttgggtcctaaaaatagtacaaaaatattcatcaaaatttcaagtttgcaatatttcaaacacatcattatgatagagttaacaggtacttataggatataacacaacaatagcaaaaaaaaaaaactacttaatttaaaataaataaccagtatatggaaacggctaaggaaaaagagaaataaaacgtttctttctctgagtaatgttttaacaagcaaagtaatgtttataattctacttgatcatatattaccaaacatgcaggtttttggagtttcataataaaatgctgcaggtggttagttttatcttaaaaaaaaagtcacgcccctctttgtatactttcaacaagttagtgtaacgatgaagagttctttgatgcacaataatgattacattgaacgtaaaggaacgtacaaggcaaagcccagttgattatataaattattttccaagggtattgaataggcacagtgagaggccttttaactctttcaaaacatgactgcactattgagtggattattgctccacttctttaaatgacacaccttcaactgtgcagagatgctgcagctattatttgcctgctcactctaccatttaccttcagagctcgctgaaaagtgcttatggacaagagggccagatcctgctgctcttcagcgtatcggaccaggtaaacatacactaacttcttgatctgtgaaaaagaaaaaaccatttaatcctagccagagtgaaaactaaacattcaatactgtctatacaaaaatccattctcaactttcctgaactaagtaacagaacctgctcatagcctacattgtaaaataaagataatataagataattaatagaaacagaaaaagtttgtgaagtaaggatttcactaatctaatctgtaacagcaacatcctatcaaggtgtcctttctcttgaagggaaaaaagttcctgagcaaaactcatacaagagtattaaaacattaactgcaaaagttttttcaaaatgagggatacaaataatattaggaacttaggttctgtccactaaccaagtacatggtatgggaacttacatttgctcatctgtcaaaaggtgctgaaacacaactctgattctatgataaaattcagattccaatagacattacatgatattttcagctccagaagaatgtgtgacaacagcatcaatttaatgtaataaaaattccagacggatggaagtgtgttctgaaaactgttttcaaaggcaattaaatcactaaatttataacaaaattatgatgagcagaaaaattaaccgaaaattgaaatctgagctgaaattcatcaactgcttgcttatgacactactctcagcttgtatctccctttccaaatatcttcagataccactgcctgattaattttctgatatatttccataggacatatctaaaggtttatggaatgttcaaagagcatgggaaagaaggggaagaaacagctggaattgatgctgaaaaggaaaactgctatactgggccacattttacatcacaggaaccaatgtggatttctttagggacaactgccagggcctccctggtggcttagatggtaaagaatccacctgcagtgcgggagacctgggttggattcctgggttggaaagatcccctggaggaggtaatggcaacccactctagtattcttgcctggagaatcccatggacagaggagtctggtgagctatatagtccgtgggttcgcagagtagtacacgactgagcaactaagcgcagcgcggccgcggccttctctcccttatgcgtcaactactctcgacacagacagcagtgttctgagttccttcaccatcctgtttgttcccttctgaattcaccccagtttgcctatattcttttcagtgtggcactccaagctacaaatgaagtctaagcaagacaaactagttaagattttgttccagatgaggtgcttctactgagacaactaattcttgattaaaaccatatactttttccaaaggtactactgactaaagcaatccacaggcctagtgaggtcttttaaaaggaggacagtatcttacatatacctacagaaattttcaacaacttaaattcaatccatcatggcaccctcctcagataattttagctcttaatctataatccaacctattttgctattcttcacaatttcaggaacaagagtgaaaacttaatgaacatactttctacatgtttatcattactaataaaaatgattaacacaccatttcaaggtaatatcaatttgtctgtactatattgacagggttataggtgaaattaacaaaacatatttccagttactcttcagtgttcaatagacccacagaatcttaaaaacgaaacctaatatataatacagcccatactgtatgtaaaacctactcaatacagcccataatcttccctttccagcaatcagaaatagtcctcaaatataacttgattttctgtctcagtctccacttagcttatcatccttttttctctcaagttctactaatcaaaatcttccataaaagcaaacattaaacgataaaatttccactagtaggggaacagtaaaacaaattacggtatgtccacataacattgtattacgtggccattatatataattaggtgaatctatatttgacattgaaaatatgtccttgtaaaaacttttaaggatgcaaaactatgcattttatgatctcacttctgtattaacagaaaatatacatgcatatgctgtattttatcagtcttagggtacaccatcaatttgtaagatgtaccaaaatttcacggaccacaagaaaggtacaaaacctctgccaattttaagtcatcctcaactgtaaagataagtcccaactgcataaactttaaaatagaaaacatatgtcttagaccagacataatacgataataatagcaaatagttatatacttaactatgtgccaggcacacttctaaatgttttaattagattaattaattttatattcataactcaatgaacagacattatcatttctattttacaggtgaagaaactgaagcacagagaggctaagtaacttgagcaacatggaaatctattaaacaaagaaccaagattcaaagcagttaagcctaaaagttaaaaaacattacacagtaaagtgttaacagtgactgtccttgggtaatggtattaaccagtgaccttcactctttacatctttctatattatttaattttttcacaatgaatattaagtttatactcataaaccaatagacattttcacttcaggggtgatctcatctttccagacaacctccaacccccaaataatagtactttctcggattttaaaagtatttgaagttttcattataaacaatctgaaacaacgtatttttaagttcccacactcctctaagatggctttttctatagcattggcaacgtgtagccaccagaactattttaaatgagttcaacagacaaaaactcagctaaatcaacaagtttttgcaagtcaaccgaactgtgacagccccttgtgaagttagccaatcaggaacaaattcactccaaaaaaaaccccacaccctggcgtgtcaatcaatcaaaagcagacctcacccaagtgcccactcatccacagatgataccaacccactcaggccccttcaagtccatgaaaccttcaaatgatcactgaatcaagtaatctcacataagaatacaaaaaatgggttccaaaattaagtgataactagtatacaagatgctaaccaaatgatccaaatatacccaatgctttagattatatttaaatggatatataaaatctttaaattcttaaatcccagtttaagaagtacttatcattttctccccaaccagattttaaagttcctaagattacaacagcaccaaaaaggagccaacatttgctggttgactgatctgcaccaatttaaacatatcaaatcaacacaagattttaaagaagatatttttcaaatccaccttggaatgaaagtgcggttatttagtacaggcaccatagcctggcacacagtaagagcccaataataatcagctgaatgaaacatcacagcccagtgagagacagggcggggggtggggggggacatttcctattagatgctatatctaacttactaccaattgttataattcatgaaacagatgtttaaaaggacatcaacaaactgttagcaaacaacaggtattaagaagattgcctccaaagtctttaacttgtgggttttttaaagaaaattaatcatttaaaatactctttctcttcaccaattatattcagatctcagtctacagttctcagcaaagtgtggaaacaagaatgagttgggtccacacccacctcttcatcttcttgggatttacttctcagcaacatcttttatttacctaactgtaagccagctcttaaagctgaattatgaactccaaaatatatctagtatatacactggcaacactgaaacgttcaaaccacagctgagctagcaggcattgctataattactcaccattggagaaggatttttatgactgttatagcaaaaagcataacaatattaaatcacagaaggttgcaaaacactaaatttgttcaagttctgttataagaatcaatcaatattgaccacaagaggcctatgcactgactggctgcaggtgtgcagagaaagcctactttccctgaaaccattctgtgaccagaaatgggagtacttaaagcttcgtgactacaccattctctgatcagttactttccttcaatgttacaatactccttgctgtaaagctaatcacagcagagccccagtaggctggaaggacacaggcagatctgtttaattagcttatcaataccagtgcgtcaaacctcatgagtcattgaccaaacctttgattatttttgttctatagccactgattgcttactaggtcacttttggtatcatttgacatcgaatggcttatgacgtgcagctcgactgtgcgtctaaggcagcatgtacttgtgaaaatgacattttgtacttgacggcaatgaaatatccattttctgaacataaattttaagcagcttaggccagtttttccacattagaggattaagcctgtttccaaaaactaacagcattttaagagcaaaacaaacctagaacaaacagatcaatacagtagttcccctctacctgtgaggggtacgttccaagacccccaatagatgcctgaaactaaagacagtactaaattccatacatactatgttttttcctacacacacatacttataataaagtttaatttataaattagccacagtatgaggctaacaataactaataataaagggaacagctgtaacaatatactgtaatggaagttgtgtgaatctgatccctctcaacttactggactgcacctacccttctcctttttgtggtgacgggagatgaggaaatacctatgtgtaagacgaagtcaggtgaatgaagctagcactgtgatacagggtcaggctgctactgaccttctgatgttacatcagaaagaggaccatccactatgggtgagcctggggtcaccgagcacgacaatgttgatggttagatgtcaggagcaggtgtcaccaatggttggggaccccagagaaaatggcacaaaatttcatcctactatgtgttacagcgagcaatttaaaacttaggaactgtttatttctagaattttccatttaatatttttggactgcagctaaccatgggtaactgaaatcgtggaaagtgaaatcatggaggagaggcagaattatatttatagggacatttgttacaaatattagacagcatatcagaatctgattgtaaagggtaaaaatgaatagaaaagttctactactgataactgaacattacaaacagctaacagtacagaattttctatttaaaacaagaagcctggaagtccagaaggaactagttacagcataacttattaccaatatctaaggacttggtcatttctagccacatctaaaacataaaaaatttatatacccaaatgggccaaagacctaaacagacatttctccaaagaagacatacagctggtcaacgggcacacaagagtgttcaacatcactaaacattagagaaatgaaaatcaaaactacaatgaggtatcacctcactctgatcagagtagccatcacttaaaaaaaaaaaatctacaaataacaaatgctggagagtatatggaggaaagggaaccctcttacactgctggtgggaatgtaaattggtgcaaccactatggaaaacagtacaaaggttcctcaaaacactaaaaaacagttgccgtattacgaagaaatcacactcccaggcgtatacccacacaaaactgtcatttgaaaagatacacgcatccctgtgttttcagtagcacgattcccaatagccaaaacatggaaaccacctaaatgtccatcaacacatgaatgaacaaacaagatgtggtacatatatacaatggaatacttgttgctattcagctgctaagctgtgtccagctctttgcgaccccatggactacagcactccaggcttccctgtctttcaccatctccagagtgtgctcagattcatgtccattgagtcagtgatgccatctaacaatctcatcctctgcctccctcttcttttgccttcaatctttcccagctataggggtcttttccagtgagtcggctctgtgcgtcacgtggccaaagtactgaagcttcagcttcagcatcagtccttccaatgaatattcagggttgatttcctttaggatggactggtttgatctccttcctgtccaagggattgtcaagaatcttcaccagcaccacagttcaaaaacatcatttcttcagggttccaccttctttatggtcaaactctcacatccatacataactactggaaaaacaacagctctgactatacagacctttgtcagcaaatgatgtctctgctttttaatatgctgtctaggtttatcataactttccttacaaagagcaagcatcttttaattttgtccccgcattcaccatccagtgaatccaccatcaccagtaattttggagtccaagaaaataaaatctgtcactgctttcacaatggaatactactccttaagtatgagataattcctaagaatgagataataccatttactgattcaatggacatgaactttgagtgaactccagcagatggtaaaggacacggaggcctgacttgctgtagttcctgcagctgcagagagtaagacacaacttagcaactgaacaatgacaacagcagcattcacagcaacatggatggacctggcaatcatcatactcagaggagcaagtcagaaaaaagacagatatcatatgatatcacttatgtgtgcaatctaaaatgtgacacaaatgacttatccatggaacagagtcacagacagagacacagccctgaggttgccaagggggagagggggttggggaaacggttagagatacaaactgttatacagaatggataagtaacagggtcctgctgcagcacacagagaactacactcaccatcctgtgaaaaaccataatggagaagaatatacaaaacaatgtatacatataactgaatcgctttgctgtacagcagaaactgatacagcagtgtaaaccaactctccttcaataaagttaaaacaaatttataccaacgccagatacctcccaaaggagagctaacaccagatgatgacaaaaggtcaaagaaactaaagaaaaaggaggaaggattcaaacaggaaggatggctttaaaaggggaatgacctaaaatggtttctgaagccaagctgcctggctctggattctgactgccacacactagtgtgtgaccttgctcacataacctaatctctctgctactctgtcctcataataaaaacatggaaaatgaaagaaccagcttcacagggctgtttgtgagtataaaatgagttgttatatgtaaggccctaagacaagctttacccacagctcacaacttttctaagtaaatcttgatttttttcctcagctacttaaactttcttataccagaaatcataaaactaatgtacatatcaaatcaggagctcagacagctcagatggcattgtcatactgcaaaaacagtttaactgaattatcaattcagaactatacatcgtaacaagctcataaattgtacttaataagcatctactaaactaatcacaagtaaactttgaaaatactgtaagatcacacgctcagtctagatttatcccattaattagaatctgagaaagaacagttcatcaacttaagtccaatattaatttatcctggttcttaagttggcaacaagtatacaagtgtttcgattttaatttactcaagttagtcaagttcactctatgatgcctattcatttgtgtacaaaattcatctatctgaaatatgtattatacttactgtctaatagaaaatgaaattacttcaaaatgtatctaaaaagcaagtttaaaatttttatagaatctttaaaattctataatataaattatcctattaaaaaatttaagatggcaggaaaatattttaatattgaaatatatactcttgaaattgtataacatatacttcaccacacttttccagatttggaacatgcaaatgcaaattatttaaacgactaatttctcttatatgagagattaacgcccaatctgttacacagtattcaaataacagctaagggtctacatcatatcaacatcgtgtttgtatgctgctgctactgctaagccgcttcagtcgtgtctgagtttgtataacacaaatgaaatgtgacctggctgatctgtttgtttcacttaagcaaaaaactctaatcatcattctcaggtcatgattattttatgcactctatttttcttgtaccaaatgcaatcttttcattagaaaatgccttgttttccaaactagaagtaattaagtactgactataaaactgctaatgacacgcagcttacttaatatattctgtaaaaccccgttccagaactgtgatataaaggatggaaaagagaaagagaattttcaagcatgtaaaccagttatgaattgaaaattcttcatggttaagtaggaaaatttgagagtaatgttttcatttgactgataactttccatatattttagggttttaaaaatatttccagattatgatataaagctataacttagaaataataactgagagatcttatttaccctccctaccttaaccacacagaaaatcaggaggaaaaaaaatgaaacaaaagttttcatatgttggacaccaggcagtacattactgtgaaccctgagaaaggggaaaaagtcaagggagcaactcaaacagaattcggaagactcactgtgccaaggacacagtgatcaaagttcacacaggccaagggtgcctgagtttgcaaagcagaataccaaaaaggagggaacatcagagagagtgaaagaatgcactctggagaggaacaacatcaaactgtgggctagcacagtcttgcacatacgatgaaacctgaagccagaccagaaaaacacagggaagaagcaggcagaacagacaccaaagatcacaaaaagcaaggaaaagctcatgttctcaccagccagggagaaaatatctcataaatatatgtacgactgagcagaatcctaagatactgctttagtagtgggcttacattagtctagactaaaggtgtttctgtatcttttagtacacattgaaagtatgctttgacaagtatcctccaattaaaaatttaaaaatacaaaaaacaaaaagaaaggataaggtggtaagaaattcatatttagtggactagcttggagatctgatacagctactgactgtttctcagagtttctaagcagttaaaataaaacagtataaaatatccaaaacaagtatgctttgaaatcatcaaatgatccatataaacttaattgtgcatcacaagaaaacccaacacaatttaaacaaaaatcaggacagtatgaatcataactgtgagaaaaatcagtctccagaaaaagacttaaaatgacagaactgtcagaactagcagagggatgttacaactattatagatacgctccatatgtccaacaaggtagacaaaaatataaatatgctgaagggacaattggaggatataaaaatgatctcattaaacatgcagaaatgaaaagtacagtagctggtaagataactatactgcaggggagtcacaatagctagacactactaaagggaagatgggttaacctgaccacttctcaagtgaagcacagagagaaaagactgaaaaagtgacctgtgcaacaatatcaactagtgtactgtatgtctgcttgaaataccagaaggaacgaagacaaaaaagacatatttttgaaaaactaatgtctgaaatgtttatcaattttaagaaaactataaacccacatgagttagaagctcaacaaacaccaagcagaataagcatgaagaaaaatatgtcaaggtataccacagtaaaactgaaaaccagtgataaagagaaaatcctaaaatcaacagaggaaagaaaagatagcttacacaaagagataagaatgacaagacacttggcataagaagccatgtaggtcagaaaacaataaaatattttttaaatactaaaagaaaaagacagtaaagaacatagatatatacattttactcagcaaagatgttttcaaattgtatacaaaaaaagctgagaaaacttttaaacaaaagctgagaaaactcatcaccagcaaaacaagaaacattaaagaaattcctctagtcatttagggaaaaaaattcattcattcatggactacatgaagaaatcaaaagggacatgaatggtaaacactgaaggacaaataaaagactttgcggggtggaaaggggagctcatttttaaatttctttaatagatatatggacttcgtggtaattttggaataaaaccgaagtagaacaatctcccacatacaattaaaaaacctagacataacacaaaaagcactaaagtccctggcaatgaaacagaaacagacagattcttctggtatagagagtatgtgcaaagatggtaagaaaaagagctgcatgaactaccttccccatttccatggtcttctgctgaggctaagtgagcagggaatggagtacaggtggaggcactgatggacaaaccagtctctctgacagaacccaaaagtgaacacagcaacaccacggccactgaagcaaacaggggaatccacaaaggagagcccagagatgggctcgtcaggcagcctctagccacctctctgactgacttctgaaccatgcaagctcagaacagacccaaagaagctcagcaaaagacaaaaaatatgagattaagtcgctgcctatgcaacagaatttgaaatctgaatctaggcaaaataactgccttctaaaacaaaaacatcacctatagaatataaaaggatgcataatctacataatttagtattcattatttcaaaagaaacaaacctaaattacccaacacaagaaaaagtaaaacaatgggacataagcacacaagaaaaggaaatcaacaaatacaagtctgaggaaataaggatactggaactagcagacaaggattttagagctggtgttgcacttattcttaagaaaaagaaaatgtgctctccattaatataggatatagaaaatcacagcaaggaaacaaaggatataaagggcttaaactgaaattctaaaatgaaaagatagttttaatacttttaatatcttaatttctaaagtaaaaaggaatgtacttaattaaatggactgaacagaagaatgagtaagcaaactcaaaaatagatgagtaagaactacataatacaaagaatgagaaaaacatcttaaaataccaacaaagtttcatacattctcggataaaaattaaacaacataacatatatgcaattttaataccagaaagagaaaaaagaagagggcaaatattacctgaaaatataatcgccccaaattttccacttttgatcaaagacaggaacttacaggactaagatgctcaacacacaccagaccaaatgaaggtgaataagatcacaccaaggtacagtctagtcagattactcaaagccaaagataaagagtaaaacatgaaagcatcaagagaaaaattacaaatcatacaggaagatcaatgatccagtcatcagaaactttacataagaaattatggacggcaaaagaatcttcaaagcatctttaagtgctgaaacaaaaagaaactattaacccagaagtctccaaccagtgaaacaattcttcaggaatgaaggcaaaatgcaaacattttcagataaaagtaagagaattcattgctagcagacctccactacagaaaaagccaacagagattcttcaggcaggatgatcttgatactgacagaaatctgaatccctagaactcaaagagaacactggatatgataaatatctgaataaatgataaatacttttttctgttttttcttttaattcctttatatcacataagtagttaaaggaaaaactgcagtgtcttatgatattttttaacttatataaatctggtaagttaataactaaaacatagaagacaacagggatagaatatatacagttgcaagatttctatattttatgtgaagaagtgcaacattaaacataactggactgtaaaaagttaagtggatacagccaacactaagaaaaaaaaaagtatgggttaaacataaaaacaagaaaaatttaagtgtgatttcttccattaaaaaagaggaaaagaagaaaagaacaaaaaaacaaaggaaaccaaaaaaaaacaaaaaagaaatggtgtaatagtacactcaaattcaacaacatcaataaatacatcaagtgctaacaacatcaacactccaattacaaaacagagatggaactcccctggtgctccagtggctaagaatccacctgccagtgcgtgggacatgggttccatctctggtctgggaagattccgcatgccacagggcaactaaacttgtgcaccaccacatctataatactgaagcccgtgcgccctacagcctgtgctctgcaacaagaaaacccactgcaatgaaaagcccacatgcctcagctagagaatagcccgactaaggcaactagagaaagcccatacacagcaacaaagaacttgcacaaccaaaaataaatagattaattaaaaaaaaaaacacaccatttgctcagatcaagctctacttctcttcattgaacttttcaatcccactcatttttctcaacagcttctacatgggctcattctgtttttctttcacactctatcagtctcatattagtccagactcatattagtccatctgatctaagattaattaccttggcctcagagctctgtgaatctcttgacagttatacagagagaccaataattagaggctcccactacatcctgccttctgctcacctcctgctacactgagaaagggtctaccagaactaagatgctccaggaaaagcactagatttggagtcctaacacctggattcagtctctgccctgattaggcctgttccactgggcatatagtactttaaaatcaagtcccaagggcagaacttcaacaaaactagcttctaagaatacttagaaagttaccatccttaaccaaggtgaagtaatctcagttttacttttcacatcctccaggaaaattccaagctaagattatgtctactttgtattcaattccacctattaagattatggacattttatttgtatcaaaagtctagtcacacttaaatatattatgttgtatttcaaagcaactgaaaagtatatgattctctcacaccaaaaggaatcatgaaaatgatgaatcaaaacagtacctcaatatttttactggccacattcttcacaacagcaggaaatagctcagatgcatttttcccttttgccatcatctgaggaataaaggtagaatataagagctcaaactgtgaaaaaattagtcatttgaaaacaaaacataaattctacattcgtataatatttagaagataagctacagaaacaaataagctatagaattaacaagcttaactctttttgagtcagcttggcccaactatctgcagcaaagaacaatctcttgtgaatcaatataaatacacaaatacatagacatattagggaagaaacacagtaatttaagacatgcaatatttataatagatttctatggctaatggcattataaacgttttcaaatatttgtactctatttaacaagttcttacattaaagatataatacatttgcaatggggtgggggtagagaataaatgttattctaaacaaactacagttattctttctccctttttttttaatagattcccctacttctccaaccattttcttcaaagttcccttcatgaggtcctcttcctttcctcactaaagttaggtgtaccatcatattttctaagagaaaaaaacaaggttcaattcaccctcctgtgttaacttctaattttttagaaagatctttgctatataccatatctaagaaattatcttaaaaagatgtaaggtgcttagttttataaatttacaaaaatgttttataaatcctatgtgacattttaaacaataatctcagttaataatctctcagaagattttctacatgacagctttagaaaactctaatataagctaatcttcattttctatttctttacctgtgatattttttgttttgtgaaaccttctgaggattaaagaaggttcataaagtggtgcagttaaagtatttctatgtgatttttacaattttctcatctgtaaaatgaggagagagggattcatgttctctagggtcccctctttcagtcattcaataattacctaagtcagataccctgtgctctgataccctattctaaggcttccccaactttagtctacagaatgctattcaaaaagatgttactacatgaaggagaaaaaaaatcctagagtcaaattcattcaacaaatattcactaagaggacactgcatgtcaggaactcttctaggccttggggataaaaccgtgaacaatacaaagtctttaccccttggattgttcatgcgtgctcagctgtgtctgtctctatgcgaccccatggactgtagtctgccaggctgctctgttcatgggattttgcaggcaggaatactagagtgggtagccatttgctcttccaggggatctccctgatccagggatcgaacccgcacctcctgcatggcaggcggattctttacctctcagtcaccagggaagcccctcacccacctgagcttacttctaatgggggcgagggacagcaaacaatgtgaggataagcagtgctatggagaaaggtaaaccgctgcaggagaaacgcgaagtgctaggcttaggggtgggagttgtccttttacgttttggttagtttttgcgtggtatatatttttccttctttatattctttatctttacattaaaagtggatttttcctagagaacatatagttgcatcttgacattttcatccaatatgacggtctcttttagttggtgacatcagatcagtactgatgccgttagattcagctcggtcactttatttatcagtttccttaattccctgtggtttttttgttctgactgccattacgctcatgatttagaaattttagtattcaataacttaacttatatttttatttttatattgactattcggctataactttttgtgtaatttttattggttcttctagaaattatgagataattacaaagatgcacagtttacagatacatagataagtaagtcaagatatgccaaaccttctacagtcatctgagagtttatattttacaagttattaggttatatgagttctttatatattctgcaaagtctacatcagatatgattaaaaatactttctctatgtggctgatagtgtcatttgatgcacgaagttttacattttgatacagtctaaactatcaattttttcttttttttcctcaccttttgatgtcatatccaagaatcctctgacaaatctcatatcataccctgtgttttagctcttacattgaggtctttgactcattttttaacttattctatatatggtattaagtaggggggtctaaattcattctcttacatgtgggttttcagtttccaaacactatttggggaaatgctacccccactgaatggtcttgcacccttgttgaaaataatgtggccacaaacatgaagtttttattttaaggcactctctctatgtgtgtgtatatatataaataaacatacacacatttatatatgtatctgcctttaagctggtaccacacatttttaaaaatttaaaaatatattttatttaaccttatatatccaaaatattagaatttctttaaaaatgtttcagtgacttctagctcccatggtttttgatgagatatatggagttgttcaaattgctgttcccttgtatgcaatgtatttttttttccaagtactttctaaattttttccagtttaactgctatacatttatgaatggttttcattcagttttatcctgatttatacagtatgttacagttcacaaaagacagcacttatttttgttttgtttttacttcttacattttctttactacattttaactaaaaaggataataacacaatcaaaacatcatttaaaagcctctcagactctatggcaggcagcttcagacacagtttccagtcatccctacccacagtatacacactctcattaactactcttattgaatatgggctagacctagtgactttttaaaaaaaactttttattttatattggagtatagctgattaacaatgttgtgataatttcaggtggacagcaaacggactcagctatatatatatacattctcttccaaacgcccctcccatccagactgccatataacactgagcagagttccctgctatacagtaggaccttgttggttatttattttaaatacagcagtgtcagtaccacacattttgattactgtagctctgtagttaagttctgaaatcagaaagtgtgagacttctaaactttgttcttctttttcaagactgtttcggccaaggacttccctggtggtctagtagttaagaatccgctgtgcagtgaaggagacatgagtttgtccctggccagggaattaagatcccacatactgaggagcaactaaactgcaaaccacaaaggagattccatgtgtcacaatggaagatcccacatgacgcaactaagacccaatgcagtcaaataaataaatgtgtgtgtgtgtatgcgcacatgcatgcatgtgtgtgtacacagacttttttatttttatttttttcaaaaaaatccctggaattttgatatgaactgcactgagtatgtagataactttgggaatattggtatttcaataagtattccaatatatgaacatgggatatttttccatttatctgtgtcttaatttcttttagcaacattttagttttcaaggtacaaatattttgtttccttgggtaagtctattcctaagtattttattcattttgatactaccataaataagactgccttcataatttctttttaggactggtgattgttactgtatggaaacacaactaatttttatgtgttaattttctatcctgcaactttgttgaatttgcttattagttctaaaatatattttgtggcatctttaggttttctaaatataaaatcatgttgtctgtgaacaaagataattttgcttcttttccaatttgggtatcttttatttctttttcatgactaattgtcatggctaaaacttccatttactatgttgaacagaagtggggaaagtaggcagcctcattttattcctcatcttagagggaaaggtttcagtcttttaccactgagtatgaagttagctgtgattttttctttaaaacaccgaggtagtttttttaattcctagtttgttgagtgatttatcatcaaagggtactgaattctatcaaatgctttttctgtatcaattaaaaatcttattttttcccctttgttctgttaaagtccaactgaataccacgtaacatgtatggctaagaaatagtttatatcaataactctaattagaaatttcaagaattttatccatcaaaagaaggttcagatttgctcattatcccaaaaggacatgcaaactaatctgagaaagacctttaacatccaacagttactaaagaaaatacatcaaagattgcgatacactgcaatattccattccttcaaggacctggaataatcaactcatcagtactttatctaaaaaacttattacaagttcactacatgaagcaatacatttcaaattcttagttcacatttcaccaaaccaagataaaatatgaatatgtgctttaaacattagacatacatttttcaaaaatatcaagaaaaataacaaatgtatgtttcaactagagtcctgcagtgtaataagcgaccacaagattttgaagtaggtagcttttcttccctaagcatgctttggcatacatgagactttattcaacatatgaaccattggaaacatttccccatgattctaaataagcctcaggtattaccaaagaaagataataaaatgaactgagactgtcattatggtttctcgctggtagatactactcatgagattctctgttgaactgcagggctaccaactgaaagacagtcagatgtgcactgccagcattttgatatatactagaaagtaatgtaaaacaaaaacataacatttaaaattttggcaaattaaaatttagaaatgtctaaaggtttttaactataaagctaaggtcttaaaactaccctgtatacaattatatgaggtgataaaaccccatattcagggctcatataatccaaattatgtagagaaatgtaaatattgaaaattacatttaaaaaaataaagaaaatttgactaatataatactctactaattggcctctagcaaactacttccacccaacagatgttttcaaatgatgcataaatgtgcatacatgcacataacatttcaaaatgattttgaaagcttccacaaagaaacagggtgctaactagaaatcacactaaaaactggacaaaagtaaaggtaaacaaatgattgttataacacacagtggaaaaaatttcaagaaaaacaattactagttatataataaaagaaaaaattagcaaccaataattgcgagtttaagagtgaaatacaaggggaaatatctggcagagctactgtgctgcggctttgattttctattttcttctccaaaagttaagttagaaaagatctgtggtgatgaacaatttctcctgaaaagaagctaggggaattaattttggaagcatttcttgaatcagaccaacccatgcccttactgtatttttaattttagtttgatattaaaacaaaattaaaagatgtctttccccatagaactttaatatgtcaaaagccatactgcccaaacgtgtttcttaaactagtacacaccaccactactactactattactactaccactagtgttttaaatccggacatggcgtttctactgtgaacatataagaataattaatattctttttaaaggctttttttcttttaaccaaacactcaggaaacattttaatttcatggctaaagaaaagtaataggtaatacctgtcattttattttttctaattactaagaagagataacttattttatttgtttagtcattcagttgtgtctgactctttgtaaccccacggactataactcgccaggctcctgtgtccatggaattctccaggcaagaatactggagtgggtagcctttcccttttccaggggatcttcctgacccagggatcgaactaggtctcccacatggcagtcatattgttaaccctctgagccacaaaggaagtccttttatttgttgtagtaaattcctaaatgaaaactggggcaaatagtatcatatctggccagctgcaacctactgccttgaccttcattcctagggtttctatgttgctatgactcttgattaagtgaccttgggttcactttataattttcctagtcatcagcaaattcacttgtatgacattactgccaaatgagaatagttattttactgtaaatgaatacggatcatcaaaaaagcgaaagctccagaaaaacatctacttctgctttattgactatgccaagcctttgactgtgtggatcacaacaaactgttttaaattcttcaagagatgggaataccagaccacctgatctgccttctcataaatctgtatgcaggtccagaaacaacagttagaactggacatggaacaacagactggttccaaatcaggaaaggagtacgttaaggctgtacactgtcaccttgcttacttaacttatatgcagagtacatcatgagaaacgcttggctggatgaagcacttggaatcaagactgccaggagaaatatcaataacttcagatatgcagagagttccagaaaaaaactacttctgctttatatctacttctgacaccacacttatggcagaaagcaaagaagaactaaagagcctcttgatgaaagtgaaagaggagaataaaaaagttggcttaaaactcaacattcagaaaattaagatcatggcatctggtcccatcacttcatggcaaataaatatggaaacagtgacagatttggggggctcgaaaatcactgcagatggtgactgcagccatgaaattaaaagacacttgttccttggaagagaagttatcaccaacctagacagtatattaaaaagcagagacattactttgccaacataggtccatctagttaaagctttggtttttccagtagtcatgaatggatgtgagagttggaccataagaaagctgagcaccaaagaattgatgcttttgaatggtggtgttggagaagactcttgagagtcccttggactgcaaggagatccaaccattccaccctaaaggagatcagtcctgggtgttctttggaaggactgatgctgaagctgaaactctagcacttcggccacctaatgcgaagagttgactcattggaaaagactctgatgctgggagggattgggggcaggaggagaaggggacgaccgaggatgagatggctggatggcatcactgacttgatggtcatgagtttagtgaactccgggagttggtgatggacagggaggcctggcgtgctgcgattcatggggtcgcaaagagtcagacacgactgagcgactgaactgaactgaagcttttttttggtagaaactgacaacctttcaaaatttacatggaaatgcaaaggatatagcataaacaaagttttttttttttttttttttttttaaggaagacttacagtactttattttaaagctacagaaatcaagggtgaggtactggtaaactgagggccacaaagacccatgaaccagaagagttcagaagtgggtccacaaatacacagtaaactgagtgtcatttgaggttgaaatctggttgggaaaggtagttttttaataacaaacattgaaatatttaataaaaatagaggcaaattagatacacatgtgtttaaaaacattcatctcttaatctcacatcatacataagaaataatgcaaactagatcttagactcacataaaggctaaaactgagaggggagatctttgcaataatggagcagaccaagatggcttaaacaataactcatgctctgaatctacaacttcacttaagtacatacatatatatctacttgaattccacaagagttaaatattacaaatatttccattaaaatcagaaacaacacagtgttgtcttctatcatgcctactactcaacatcatagtgtaacttaatccctgcaaagagagaagaaaaacgagtaagagctaaaatatttgaaaataaaatataaatctgtcatgacttaaggataacacaattaactatccaaaaatctagcaaagaaaccaaaaaactatcagatttaagaagagttcgctgagaaggtcaaatacaagaacagaaaagtcatttgttctcctatacactagtaataattaattttgaaaatataacgaaagagaccattcataatggcaaaagaaactgaaaagtacacaggaatgtatctagcaacaatgttcaagatttcttatgattaaaaactataaaatatgaatatgctgctactgaaagacaggaaaagagtggagatggaaatacacaaattccgtattaccctaatcaaaatccaaaaataatttttaacagaacttgacaatttaatcctaaagtatacctggaagctgaaatttttactttttatatctcaatatgatttgaaaatttacaaatacatatttgtgtcacttgtctaataatttttttcccgatctacggagatataattgacatagaatactatgtaaattaaaggtgccaacaggtacatgaaaaagatgttgttcaacatcagtcagtatcaaggaaatgtacatcaaatctacaatgaggttatcacctcaaacctcttagaactgctatgaacaaaaagacaagacataacaggtgtttgtgaggatgtagacaaagggaaacactgtgcactgttgttaatgtgagatatacttacatctttcttatacacacacacacatacatacatatgtgtctgtgctgtttataaaatgggatattattcagccatgagaaaggaagaaattctgacatttgtaacaatatggataaatcctgaggacattatacaatgggaaggaataatttttaattaagaatcattttcctacagtttaatgatcaagttccaagtttacatttatacaaacttcctaatggaaagtctgtaactaccagactaactcctaccatagctatatttacacttctttatgatgtctatttacatgtaaattacatttataacattcaagtagtctagactgtgagaatatccattttatttctttatcagtttgaaagaggaatatagaaaaaactaccaaatatctcattttcatatttaggaatttcaatagcatcctcagacttagtgaaataatttaccttagtgggatgtaaaaccaaaattcagtgaaataattaagagtactgcctgctttatatggcattgcaagactgtatcctgcaggtctgcaagctgaaagcagtgtaaagcaatctgacaactggatctgtaacttacaagaattttataaaaaacatttaatactatattactgtcagaaatatataggcaggaaaatgaaacatgataaaattaacatttatttagtatcagttcagttcatttcagtcactcagtcatgtctgactctttgtaaccccatgaatcacagcacgccaagcctccctgtccatcaccaactcccggagttcactcagactcgcgtccatgagtccgtgatgccatccagctatttcatcctctatcatccccttctcctcctgcccccaatccctcccagcatcagagtcttttccaatgagtcaactcttcgcatgaggtggccaaagtactggagtttcagcttcagcatcattccttccaaagaaatcccagggctgatctccttcagaatggactgcttggatctccttgcagtccaagggaccctcaagagtcttctccagcaccacagttcaaaagcatcaattcttcggtgctcagctttcttcacagtccaactctcacatccatacatgactactggaaaaaccatagctttgactagacggaccttagtcggcaaactaatatctctgcgtttgaatatgctatctaagttggtcataacttttcttccaaggagtaagcgtcttttaatttcatggctgcagtcaccatctgcagtgattttggagcccaaaaaaaatatagtctgacactgtttccactgtttccccatctatttcccatgaagtgatgggaccggataccttataacattagaatcattgagaattaactgatcaggagtagtttgaatggacctgccttattctcatcatttgaagtatcaagcaagcatctttagggcttcccacgtagcgctagtggtaaagaatgcgccctccaatgaaagagacataagagccttggattcagttcctgggtggggaaaatcccctggaggagggtatggcaacccactccagtattcttgcctggagaatgccatggtcagaggagcctggtgggctaaagtccatgcggtcacaaagagttggacacagctgaagcgactgagcatgcatgcatgcatggaagcatcttgtatattccttgataaatcaattctaagtctggatcagcttccaagattgtgtcctttgtacttctaatgttgtgaattatctcctagagttcctctaatatgaagcttttggcagcatcacttcctcggggcatatcttcagccttttcatcacaaccattttcctcatttatgctgaaaagcctgccttactgaggtgcctctagctacatgtttgtgcgtgctcagtcgtgtctgactctctgcaatcccatggactctaacagcccgccaggctcctctgtccgtgggatttcccaggcaggatttagagtctctccaaaagtggcagcatcagcatttgcacagtcagcaatttctccacaactccagttacattctacctgaatttcatttctagtgtcatcacttttcatttccttcctgcatttttatctttgttgatcaaatcctgtttttcataatccattttggtaaaatgtcaagtgggcttctccctggtaaataaggagggaccaatactgcatgccttgcagtctgtacacaagctgagcaacacacacagtgaccaactgctaaaaataactctgaaagaagtgacatgacccacgcatatttgttatatatatatagtgagttgaggactgaagttagtgatgaaacttgtacagtatgcaattactaagtcaatataccatgataactgaaatataaacctattgtgaggagactggtgttatttaactaagctgtggtgactgaaattcaaataccaaagccatgtaaagcaaagaactacctctccatgaatgctattattacacggtataacactgcgtgtgtgctcactcattcagtcgtgtccagctatttgtggccccacagactgaagtctgccaagttcctctgtccatgggatttttcaggaaagaatactggagtgggttcccattaccaacttcaggggatcttcctgacccagggaccaaacctgtgtctcctgtgtcttctgcattgcagatggattctttatctgcagagccactagggaagccttggtttaacatgaacaaatgaaaaatttaccaaaaactcttcatcatttgccttcattaccaaatgacataaatctaaataaaagaatctagcaagttctacaggtataattagtacttgacttttacatattgtgttttcacaacaacaaacttttaaacaccgtaaattcatatctataatcatccttcataaatgggatttggattttagaatacagatttcagactctcatattgtggcactgtctgccggaaaacagtactgtttcagctgtgtttacatccttctacagtcgagtttatttgtgcaattacatgaatttactaaattttgacctgatacaaaaagttctggaaaacaaaatcagcaattgtggaaaaaagcaaagtactagtaagaaagacaaagtctgacaaatttaattccactgagacaagcagactctttagcagatagtcactgaattaagccagtttttttcactgtcaatataaacaatcaaaaaaagagcaagacccacacaaattgcaaaaatatttttaagcttattatataatcagaaattgcattatatttttaattctgacagtagaaccccttacataataatatattagactactatctgaattttgcattacaaaagaaaagtagagaatgtttttacatctattaatattcattagaagttctatgctgataaactgaataaaccatttatatcggtagtaaagaaatttgaagatcagaagaaaggatgctcacaatttttaggtcatagaatgaccaaaaaaatatcctttagctcattagcatccctctctgtaggaagtcaaaatgttgtagtatataatcttactttctcttcaaactgattagcactctctatttgataaaagaaatatttgagaaacagaaaagacagaattagaactcaagtttctgaattttgtcacttcattacttcttccaaaatattttagacaggaaattttaagttaataataaagggtagatgggaatgcttgatttggtatttaacatattctataacatatatttttagcataccactacttgtcatttattcaaaagtcaaaatgatctaattactttacctaccccaacaatccgtttcatagcatccaatttagcagaatctttgttgctctctaacatttgctttagatcttcatttctacacacaaaaaagaaaaatttcatattcagattttatataacacaggcattaaaacatgtaattttaataacatgatgtacattattaccaaattattttcttatttataattaaatacatgtttctcatctaaccctacaaaataatatcaaagtggttaaatggaatagaacactaccctaacaaagacatctacaagttaagtacaaataaaagtaggaaaatcagaacaagacttatgaagtacgtcaatgtcaacatcttggctgtgatattgtactatagtttatcattgaaggaaactgggtaaagggcacacagaatctctctgtattactttttatacctgaatatgaatatacaattatttcaaaatcaaaagtttaactataaaaaaagttatataacaattaccactcatttataagatgacacaccaatttttttttaatggtcaaaaaacccgaaaaggcatttcacacacacacaaatagattaggaatactggtaaatatttaaggtcattaactatcaaaaacgcaaacttaatgagaaaccattacacatccatgagaatagatgaaactaagacaatgacaataacaaatgttgccaaggctatggagcaactagaactctcacacactgctgggaggaatgtaagagagtacaatcactttggaaaattgggagttccttccaaatttaaacataaacctactatgtgatccagtcattccactttcagagacagaaaaacaattctactgaataacttaaagaatagtcatagcagctttatccatagcaaaaaatcagaaacaatctaaatgtccatcagcaaaatgggatttagccatacactgggatattactcacaaaggaaaaagaaccaaccactgatacatacaataatatggatgaagtctcaaagttattatgcgactgaaagacaccagacacaaaagaccataactgaattaatttaaagttctagaaaatgcaatctgtagggacagaaccaaggtagtggattcctaagtagaaggagaaatggacaaagggacattagaaatttcttccataagaagatggaaatgttgtgtatcttcttaattgtggtagcgatttcacaggtatatacatctgtcaaaaactcatctaattataatctaaaattgggtaatttggtgtatgagaactatacctccattaaaatgatattaaaaagtttttgtagtgttttattcacatttgtgaataagatataaatactccaaaagattaaaagacgtttatccgtttctgagaaatacattattaaggatctgataagccatccttatacatactctgaaattaagaatatcacacttaagtctcaagcttactcaagaatttaaatcactgaaccttattttaggacagcactgaaaaatcatcttaaatgactatacagattgtatacaaactattaatacaaagtattacaaactataactaatcactttgtactcgttatcagtttatgattagcaatttttaatagtttctacaacaaactctccagaaaagagattttaaaaatttactccatacagcttcatgcaatatggttcaaggtgctcacatgcatgggtggacccaaacaaagtatcagaagctctctgatctcagcttaagcttaaaagtaggtgagaagagcttccttaactactctaaatagacagccttgacaaaagtactttgcatttacaaatttaggcctaatacaggcagtaagcacataccaagaataaatgaatgatcatgcgttattatgaggtgagttgtgttccttccaaagttcctatgttaaaatcctaaccctcaataccgcagaatatgaatgtatttgaagaatcattgaagaggttaattaaattaaaataggtcaccatgggtgggccctcatccaatataagtgattctttataagaagagcaggttaggactgattcaaaagaccaaaagatggccatgtgagggcacagcaagtaggtggccttcgcaagccagggagagaggcttccgcggaaaccaaatctgccaaaactctgatctgcaatttctagcctccaggatccggaaaaagaaatgtgtgattaggccactgcatctggagtattttgttacggtagtcctagcaaactaatattggagttaaatgttacaaactgtcactgcaggaaaaataaataaaggcaatgagatttattatgaaaaagttactcttcctttccaagcagctcataaaattaaatacaacggtgaccactagcaagacacaataaacaatcacaataatgacttttgtctaattaaaaatatagctaatttaaaaaaatagtaagaaagcaacatataagaactacatctgaggatatataacaaccaaatatacaatactccaattggtcactgcaatgaattcagaattccttcttaaaattccctgttctttcacactgcactgttaaccgaaaaggaacaaaaattccttttgttgaaattttttgtggcaggacccacaaatcaggtttttcccccttctactttttgctattttcctgttttacttactgaccatgtaggctataaaaaaaaaaaaaaaaaaaaaaaaaaacactaaaagaaaccttttaaaactttttggaaataagaacttgaaaaaaggtaaagtaattagataagtaaacagaaagaaagtgtgaccacacacgtacatgtcaaaaaaaaaaaattcattttctcatgtctgatcccttttttccccaagagtattctaccaatcttctctacaagtgttatctggagagaaaaatgagcaatgaagaataatgaagtgtccattttcaggacattccaacctccaactccaggtgtaatcttattcatggcctaatgaaaacttggtttgttccttatgcttacagttcccttcccaaacacctttatgtcctgatccactctcttaaactaaaaataaaaaaacaggaactcaatattaaagtcaaaggttttgctcttcatgcctaacagaaaagatggtcttcaataacaaatataactatcttcagtgttaacatgggtagaaagctaataactttgaggttcagagaaaagaaacaagaaaactcctaggcaccgccttcaacctgatgtaatattcaacttctcagatatgtcataaagtcctattgaaaattctgatataaattgcatactctacccaaattcctctttgcttgtcattaaaacagtaaagatatgggaaagttaataccaaaacacctcatttactctcaaaatatgttcacttgtattgagccattttaggtcacctccttcattatatagattcaaatatggtcgattaacatgtatcactatattaaccttaagaatttagttttataattttgaaaaatctaaataaggaacaaaaagaaattctttgtgggaaacatcaagagttaatccaaaacaatgctgaattagtaacatttttcattgattctaccaaaaaccaatccaaatacctagttcttcatttatctacttacctgtagcttttcagcttttgagtattaaaatacaactttatttttacataagtgacatcttgtggtgttaagtggtataacttttcatgttcaaaatatgcttgtttttatagtttcaaggaccgaagaaaaataagtaactggaaagttaaagaaaatcttactgttaccaagaagtcacttttacttcagcactgtgtaaagcagcaactattcaaaaagcaaaattttaacagttaccctttcagaacttaagtagtaaagcttttacagtgtgtaaattacctctttttaaaaaacccccaatccataactcattaaaacctcctactcctttgaaagactgtgtagattaaggagaaactaacactgcagcactgtacactgtctcggcgcttctcctgatccgatcggagaaggaccggccggagagccattactagcgcacaaattcttgccactaatccataggagacagaaacagaagctgagagactatacttagggcacttcaacagtgtagtgttatatttttgaatgtaaaagctagggctagcattttgcatgctttttccagcaattcattttttattgtattttacagaagtatctatccataatggactggaaatttaaaaggaaaaaaaaaagggcccttcaccagtttgagagcactgtgctacataattgcttccttttctcttgaaagaatcacaaaaacttgggtactatagaaagtaacacttgaattttaaatccaggtatgacggattgggaaaagtgatgaacagtgatttccagtcagcagtaaagtacatcctcaaaaggatgcatcaaaaatctctgagaggggaggactgaaactttctcagctcagtccagtcactcagtcgtgtttgactctttgcaaccccatgaaccgcagcacgccaggcctcctgtccatcacccacacccagagtctacccaaacccatgtccattgagtcggtgatgccatccaaccaccttatcctcagttgtccccttctcctgccctcaatctttcccagcatcagggtcttttcaaatgagtcagctcttcgcatcaggtggccaaagtactggagttttagcttcaacatcagtccttccaatgaacacccaggactgacttcctttaagatggactggttggatctccttgcagtccaagggactctcaagagtcttctccaacaccacagttcaaaagcatcaattcttctgtgctcagatttctttatagtccaactctcacatccctacatgactactggaaaaaccatagccttgactagacagacctttattgacaaagtaatgtctctgctttaaatatgctatctaggttggtcataactttccttccaaggagtaagcgtcttttaatttcatggctgcaatcaccatctgcagtgattttggagcccagaaaaataaagtcagccactgtttccactgtttccccatctatttcccatgaagtgatgggaccggatgccatgatcttagttttctgaatgttgagctttaagccaactttttcactcttctctttcactttcctcaagaggctctttagttcttcttcactttctgccataagggtggtgtcatccgcatatctgaggttactgatatttctcctggcaaccctgattcttggtggcggccgagaggagctacctgcgcccaaggtcggggcagtggctgggaggagctaccccacgtctgaggtaaggagcggcggctgcaccttgctggagcagtcgtcaagggagaccccacgtccaaggtaagagaaacccaagtaagaggtaggcactgagagagggcatcagagggcagacagactgaaaccacaagcacgacaacaggtcaatctgatcacacggaccacagccctgtctaactcaatgaaactaaggcatgacatgtggggccacccaagacgggtgggtcatggtggagaggtctgacagaatgtggtccactggagaaaagaatggcaaatcacttcagcatgcttgccttgagaatcccatgaacagtatgaaactttctcaagccccatcaaaaaattctaacccatgggcacctcttcatactttgacaactactcaagtgaaagatgcttcaactccaaaaggtcccctgtatacacgaatgctgctgctcagtcgctcaagtgtgtccaactgtttgtgaccccatggactgcagccaccaggctcctctgtccatggggctctccaggcaagaacaccggagtaggctgccaatcccttctccagtgtacatgaacaggtatgtagaataggtatgtaggaaaaaaaaggctgggaacaagagtcaaaatttactttttttctagcactgtgcagctaaaggtactgcacttcataattagtttccgtgcacaaggtgaaacctcagtaactctccctcggatgacactcaaaactttatgtagttttgggcacaaagtattaattaataaacacaaaagtgagtaaaatcagagaattccaactaccgaataatccatttattaactctctaaagggagaaaccataaattatccaagtaaatatgaactttttctactatactctccacgaaactaaaaaagaatagtctacaattgctatcacaacatcctcagtccttggtaatctccgttttctctctgctcttctattaaaagttctttcagaaaagtaagaaataacctccttctttaaaaatccaatgcagaaatctcatgaatacttttagattatttgatatttgatataactgactcctcttctatttctaaattccttcttcccttagattctgtaattctccattctcatctggttctaatttgcatttgtgacataccaataaataaaaatgatgaaaatccctgcccttgtagagttttcattttaataagtaaaagagacaacaatcaaacataataaaagaataaattttaaaatcatgagatgatatgaaggaaaaacagagcaaagggagagagaatgcagaagggaaaggaagaggccattttaaatagggtggtcagaataggctaacgaaagaaatatctgaacaaacatttgccaagtgagggagtcagtcgtactgatactggaggggagggacagagggaaagagcactccaggcagagcctgtaagcagagcagatgaaggaaggtaaagaatgctaaggtgctcaccctgaatgaagttgggaaccataggagggtgatgaatagagaagtcatagtctagtacacaaacagaatcactctggccgttatgtttggaagacactgtaggtacttccaaatctgcccacgctgctcttatttgtaagacactaaccctgccgcagaaaatgactacaaaaaccggaaaaaacaaataaggcaactttctaaagtcatccaggcagaacttaaggggccaagatcatggaaggaatggaagcacataaagtgggcttttcattcacatcagctttcttcccgactgcatttctcaaattgatatctgggagaatagaatccaaggataaaaatgacagttttaaaagactaaagagacaaacgttactgtttgtggctaccaaaggaactggaacttgaagggtgaaactacagaggagggaaccagtgaaaaggtacacaaaaatctgtgtacaaactcccttcaacagtcggctatgttttcacagagttaagaatgcgggaaatccaggagaaaagaacagtgctgggaggttaaatattaatgcctcatcagagttcagcaggcacgcacggcagggaagagaagctggaaaccaggtctcctaaggagatgtggtggtctggttcctcagtcgtgtctacctgtcctgtgatcccatgaactgtatgcccgccaggctcctctgtccatgggatttcccaggcaaaaatactggaatggggtgccatttccttctccagggagatgttggtaaataccctggcctttcagttaagaccacaggaggggcacaattgaaaagtaaggatacttcttagacgtataagaaaatgttgatgtatggcaaaaccaatacagtattataaagtaaaataaagtaaaaaaaaaaaagaatcacaaaatttaaaaagaaagaaaaactgaaatagacaaaacctttaaaagcctaaactgaacttaaacaagaccaaagtgctctgctagcactgtactgtcaggaagaaaaaaaacaaaacacataatcctctttggaagacatcattcagagactcatctatgttcctgattacctagcatctgatcaaaacttgagacacactaaaaacaggaacaaatgacaggaaagagagagggagggtagaaggaaagagggagggagagaaaggagagaaaagacaaaaaggaattgaaacagatccagggtaactcacaaactagttactaaacagggacttttaaaccactacagttaatatagcagaaaaaaacaggaaaagatggacaaaagagacaaaataatagagaatgtcaataaagtagtaaaatctatataaaataatcaaatgaacattcagaaattaaaagtataatttatgaaatgaagaactcactatataggtttaagagcagactgaaaatagcagaagataataggactattgaaagtaaaggcaggtcaagagaaaatacacaatctgaagcaccaagaaatacaagaatggaaaacactgaatggcacatcagagacatgtataacataatcagaatatctaacatacctaaaaagagggaggagagacaagtgaagtgaaatgaaagtcgctcagttgtgtccaactccttgtgaccccatggactatacagtccgtggaattctccaggccagaatactggagtgggtagcctttcccttctccaagggctctccttaacccagggattgaacccaggtctcttgcattgcaggcggattttttaccagctgagccacaaggaaagctcaagaacactaaagtgggtagcctatcccttctccagcagatcttccagacccagattctttaccaactgagctatcagggaaacccccaaaagaacgggacaaaagcagtatttcaaaagctaatggctaagaatttttctaaactggtgaaggacataaacttactatatattttaaaatcttaaaaaaaaggaaaaacataaagccatacacacggagacagacagacagacagacagacagacagacacatggtctagaatagtcaaacagctgaaaatcaaaagataatgagaaaaatctttaatggatgcaaaaaaaaaaaaaaaaagacatttctttaaggaaagggtcaacaaaactttgcaataaagggccaaatattttaggcattacatgccataccatctctcatgactgtaaagtaaaatcagttaaaacaatacataaataaatgggctggctgtgttctaataaaactttatacatatgaggatttccaggtggcacagtggtaaagaatccacctgccattgcaggagacccaagagacacgggtttgatccctgggttgggaagatctcctgaagcaggaaatggcaacctactcctgtattctcatctggaaaattccacagacagagaagcctggcaggctccactccatatgttcacatagaatcagatactactaagcgactcagcaagcatgcacaaatgcacaggccatagtttatcaatccttgttttaaaaggatcaacaataatactgagagccacttttcaaaagaatctacagacatcagaagacaatcaaatgacatctttaaaaagctgaaagaaataaggccaacaaacaattctatacccactgaaagaaaatatgcctcaaagctgaaggtgaaaaaaagtaattttcagaccaataactgctgaggatctgctgccaggatataaaaggatatcatttcaaaaggaagacaactctaaatttacatggtatttattctaaatttatacctttcatctgtaaaggaaaacttccatctataaagcagaactaatagaagacagacatacatccacaagcataactggcacttttaacacacctctctgagaacaagtagattaaaaaattcaataaagatgtagaaaatatgaacacaaataaccagcttaacctgacatgcatagaacagtatatccaacaactgcagaataaacattcttttcaagtgcacataaaacactacttatcaaaataaaattatatgctggataagatctttacaaatttcaaagatctaaaatcatttagggtacatggaatctaactaaaaatccataaaagaaaaaaaagctagaaaatgctcagatgtttggaaagataagcaacacactttaaataacctatgggtcaaagaaaaaatcatcagggatattagaaaatattttgaactgaccaacaaaattgcaacatctcacaacgcatgatatacaacaaaagcagcacttagaagtaaatttgtatttctaattggaaggactgatgcagaagctgaaactccaatactttggccacctgatccgaagaactgactcactggagaagaccctgatgctgggagggattgggggcaggaggagaaggggatgacagaggatgaaatagctggatggccccaccgactcaatggacatgagtctgggtgaactccggcagttggtgatgggcagggagacctggtgggctgcgcttcatggggtcgcaaagagctggacacgactgagcaaccaaactgaactgaaatgcaatataaaagaagaaagactgaatatcaatattctaggcttctgtttcgggagaaggcaatggcaccccactccagtactcttgcctggaaaaccccatggacagaggagcctggaaggctgcagtccatggggtcgctgggagtaggacacgactgagcgacttcgctttcacttttcacttttatgcactggagaaggaaatggcaacccactccagtgttcttgcctggagaatcccagggatggcggagcctggtgggctgctgtctatggggtcgcacagagtagcagtagcagcagaaggcttccatttcaggaaactagaaaaagaacagcaagttaaactcaaagaacaagtaaagaaataaagaataaggggagaattcaagacaatagaaagaaactacaacagacaaaaatcaacaaaactaaagatctctttcacacaggttgttaagaaacttaatgcgatcactgtacagcacttaccaccgggcctagcacattcatttattcggaatgtactaggttccaggaactgttctgagtactgggacttacattctaagtgagaatgcaggggagcggggtaggggtgagggccaatgacagaaatgacagaagggggggggaggagagagggaaagggaagggaaacaaatacaaacagaataagtactattcaaataattaaagcagggtaataaaattaaagtaagactgggcaatcacaaaagatctctataggtagaagtgatcaatcaagctgagatctcaaaagacaaggagccaaccacaggaattttgcaaagatacatggaataaacacagataataaagaccaaaagaaggtctacaaagggtctataaatgtacacaatggttgttttctcaactacactaaacacacaataaatattagctgaaagaataaatgaacataagctgtatgctaactgtgctccttagaggaatacaagaaaattcttttaaggtttcactggattctcaaaatagtccacgacccgaataaaagttaaaaactaagcatacatcttccatgtatacattccacatgtgcatgttttaaaaatcatgatgtcatatatacatcacagaaagtctccatatttgccaaaccctttatcaaagtcctcagctactattccgttggccggcagcaggaagtagattttacttttgctcaggatataaggaatactttctagaatgtgacgactcatccttaaagttttaaaggaaatatcacagagtcattcagctacttaggaacaagctaaaattcttttttctatttaacagctccataaaccaaagttgccaccttcaataaaagattaaaaagggtcatggagtctcaaaagtcatttagatttgatgaatataaacacagaaagtttaaaaatttttgcactacgagtaagtgaatttggaatttaactcatgagagagctaatttccttagaatacaaaagacccttaactaatcaagagtcgatccaacagggaaatggacaaaggacatataaggtatttcactgggaaaataaaaccaacaaatatgagggagaagatgtaatgcactagcaattataaagattcggtataaaaacattttaaaatgttattatatattatcatttggtaatattatacgtatatatgatcatctggcttacacattttttttcctagaaggatacacaagaactttttcattgtgattacctcagcggggtacaggggaagtgatacattttctctattactaacatgccttacattgataacatataattaacttatttagtcatctgaaagtggtattgttttctagaacgtaaaggattatttatttatttatttattttagtatcacagagtctctaggaagcatgtggagttattcactatttaattaataaggaaactgaagctcagagaatataaggataacatgcaagtaaaaaattacatgtaagaaattctaaacataattttcaagtataccaccacagaattagggaacagcaaagaattaaacttgagtcttgttctgaaatccaacattctccccatttactaagaaaacatttcaagaattacagaataagtataaaatccataaccaatggtaccacaatacttccctaatttttataattgaccacaagaaaactggtgcatttttttacattttaaattcaaaattttgtgaaaagaacactgatcactggaaccataataaacactaattctaactattctcagtagtagtctaaagcatctgtgatatacttctgtctaagtcaaaataaattttattttcactgacattactttgactatatttggttaacattatctcatgtagattcatcagctcaaaattaattagtattacagaatagtgtattccatccaaacaattcatctttgttggctcacatgccccaatgatactggcgtgccaccgtaacagtgggcacggtgccacaggagcagatgggcacaaacacagccaggccaacgagtcagtgtgcgcatcaagtatgagtggtattattagatctgcctccaagaacttcataaatgacagtaaaataaatataagttttctactatgctcataagatatgccgactcaaagctagattaatttttaaatccttaaaaagaaaaaaatcaactttccaaggccacagaaggcaagttttccatctgatgagtttggattagccttctgtttagggaattgaggaaaccaatatgcaatctctaccttagataagctttgtccctgaagcacttgaaaatctcagtaaaaaattcagttttgaaaaaatcacttggcactgttctcaaaattaaacggttctgagatctgttgaacaacaatgtgagtatacttaacactaatggattatatacttaaaaattgttaagatggtaaattttatgttatgtatttttaatcacaatttttaaaaaaagtcacacagccctgtcaagtttcctgatgaaggccatgtaggcctagaaacagaaaaaagtcctacaatttcctataacaggaaaaaaaatttgaaaatgcaaatcactgagctttacatgtttaaattctgcattctgttggaaaaaactattgttaattttcaaaaaatttatttccacatgtatttttaaattttttaaatataaaacacgatactgaccaaataatactgaaaatttttataatttgtaccatattaatgaaaagttttaaaatactaaaaatgctacaaaaaagggggagggaatcatttgtaatcactattatccaaaatcatttgttaagtactatataaggtaccaagaaaaatggctgtgtgtgtgtgtgtgtatgtgtgtaaacaaaatctatctctgacttaatttaactacattttctttttaaagaaatgttcaaggatccaatcaccttgggaaatccaatctgttattttgtaactattgatactgtcagacgggcagaaaatttaagaagtctatttttaactttactcactattttttgagaatttttttttttaatgtagaccatttttgaagtttttattgaatttgttacactatgattgctgtcttaggttttggttttttggccacgagccacgtgggagcgtaactccctgaccagggatcacgcttgcacccccagcactggaaggtaaaatcttaaccaccagactgccagggaagtctctgctgctgctgctaagtcgcttcagtcgtgtccgactctgtgcgaccccatagacggcagcccaccaagctcccccgtccctgggattctccaggcaagaacactggagtgggttgccatttccttctccagtgcatgaaagtgaaaagtgaaagtgaagtcgctccgttgcgtccgactcttagcgaccccgtggactgcagcctacctggctcctccgtccatgggattttccaggcaagagtactggagtggggtgccattgccttctccagggaagtctctaatttacttttaactgaccacagcatttgtatcatcttatggctcccaaacctctgtctctagcctaagtcttccctaagcttgactcatgtatccaactgtctatttattatctctactcggatgcctaataggtgtctcacacttaatgtgctcaagctcctgaacatctcccctttttaaaaagttcctctatatagtcttcttcatttcaattgatacccatcccaaacttccagctgtttaggcaaaaagcttgtgtccatccttgatatctttttctctcacacaccatcatccaaaccatcagccaatctcactggatctactttcaaaatatatccagaatccaatcactgctccccactatcaccgatcggaccgaggcatcaccttttcttgcctggattaccatagggtgtccttgctggtccctgcctcagatctgcagtctattcctagttcaggagacaaaacgatatattaaaaacataagttgggtcatctcactcttcagttcaaaaccctccaatggcttccttctcacacagagtaaaatccaagtccttacaaggatgtacaaaaagccctacacaatctggtccttacctctctgatctcatctactacctccccctcttccttcattcactctgtgcagacatactggcctctttgctatgctcccaggtcagaaattcttctgcctcagagcctgagcatacacaattcctctgactgaagacttctttctccccagacatctgcatgtcaacccctcacctacttcaggtattcacaagcatcttttcttcaccctgctatttcaaactcaacccaacctccatcttaattctctatcctttccctgccttatttttctctatacagctccctgttatcaaatgactgaccatatattgacattttattgcttatcttcttcagattggaatatactccatgaaagcaggcattttgcccactgactgattaatccccagcattaagaagagtaccaagcataagaaggcactcatatttgctaaatgtttagttacttctatattatttaggttatagaaagaaacattagaaatgaataaaaaaatggtctcaagtattctacagaccataacctctttgaaaaaagaaatacatctggcacacaataggcacttaataatgactgactgacttctaaatgcccattctgctcaaaaccttccaatggcttctcttcacactcaagagtaaaatccaaagtccttacaaggccctacacaatctggcccccaaccttctactcttccccctacttttccacctccatagtactaaatctcccccccattctttatgactacatccttaacctaggctttaagaaattttaagtaacctattcctagagtaaagctctgccaacccatgatcttgggaccagccttactcataagcctctcgcttattcagctggcatgccacctcactcagctgtcagattaaagacacaggccttctaattaggtcagtccctatcagcaatacaagtaatcggcccatcaataaacagacattgactataaattgtccacttttgtagatctatgaactctttccagctgacatgttaaataagtcttccctaagcacataacccaaagaatgttattcataataatgtgaaactcaggaaaatcatttccttcttgattattctactttgggctcttcactttaaattttgaatttggactgcaggcaatttgtttttgtcggtagctcatttatattcacaattgcaatactgtcaaattatttcactataaaacatgtcattccatgagcatttgtaacttttctgcagtaaaaaaagaacatttcaacccaccatctgtctgatcttttcagttttactcattcaattctagcaatgttacctcaaattctaaatatttttagaaataatatctcacatcctgggatttaatagtaaggcttgatttaaaatattctagatttttctccttagatttcacaaaatcaatgttcttaaaataacatattctatattttcttggttgagtatttaagataaactgtaaaagtcagaactgaatcttctccaagaagaaatgcaagctaagcaaataaaatagaacagttataatctattgcaaagcaggactctgcagtatttcatcactgtttttgttcaatgtggtaaaatcttatttgatttgaagaacatttcaagaattaaattataggaaccctactgcaccactaaaagtgacaatccttaacttgaatagctagccctctgtagaactgacagtcttacttccacgaagacaaaaacaactaattcatctacccagaaatgaactgcagatatcattatatagattcttcttttgttaacagccatcttggaagaaacgacatttacttcataaaagagcaataaaaacactgaaattgggagttgcctagaggcccagtaactgggactcagtgctctcactgtcatggccaggattcaatccctgggcagggaactaatatcccacaagccacacagtgtggccaaaataaaataaacacttaaactgccttatatttcatatgttccttgtaaataaaaacattagggcccaatttacatatacagcatggcaactatgctgttaacatcgctataactagattaagtggccataaattccaacaagctaagcagaattaacaagatgagcagttaccaaaactggagttatcagaactcaaaagaattaaatcttcaaaaattgaagatgacgacaaggacaaaaatatgctacagaaatcattaatggagtatattttcataccagcagcaccgaattcctaaacacaagaaaaaggaattcacaatgaagagcctgtgcctcttcataatatgctaacaactcagagctccagcattttcagcatatcaaactaaaatgtgtttgacatttcaaaattccagcatgtccattttcttcagtaaatcactgtttacaaaaataaaggcttatagacacatgtgtatgtacggctgagtccccttgctgttcacctgaaattatcacaacattgtttgttaatctgctatgaaagtgaaagtgactcagtgtgtccaactctttgtgaattctccaggccagaatattggagtgggaagcctttcccttctccaggggatcttcccaacccagggatcaaacctaatttcccacattgcgggcagagtctttaccagctgagccacaagggaagcccaagaatactggagtgggtagcctatctctgccccagcgggatcttcctgacccaggaattgaactgggatctcctgcattgcaggtaccaatggagctatcagggaaaccctgttaattgactacaccctaattcaaaataaaaagtttaaaaacaaaaaaacctcagtgggccaagttcacattaaaatgcactattcattcagggaaaaaaaaaaaataaaggcttataataagtcatttatcacactgaaaacttgagaattactacacaatttaacactatatatttgtactattcatattagttcacattagccttatctcaccaaatatattcttaaaggtaagctaaaatcttatctgctgaaaacacataagaattaattatacttctggtataaccccacatttgcaaataaaaatgctttttgaagaatggtatagacttcaaaatcttgattataaaattcatttaacacccacctatatgacaattccaagtcaattaatcctgaccacaacaaaacctgaagcaatgacataaagaaaatggctgtttggggccttcacggtaatgcaataatacattaatagggatagcaggttaggtttttccttctgtataagggccacagaatctggtcgtgtttatttttaactacactggctaagtgaagtgaagtcgctcagtcatgtccgactctttgtgaccccatagactgtagcctaccaggctcctcttgtccataggattttccaggcaatagtactggagtgggttgccatttccttctccaggggatcttcccaacccagggattgaacccaggtctcccacattgtatacagacgccttaccgtctgagccaccagggaagtcctggctaaagagacagtaaatattggtagaatctgaatcattcaatgatcaggcattaagtaaaagatctaaaatatttattatgcaaaattatgagccaaacactttgctaggcatcttcacataaactacactatctaattaagggattcgttggtggctcacagggatactggtgcctggcaagtgtcatttaggaattctcttctagttaactagtgtcaggacccagcccacccaccagcccacaggcaccagtcctggaacactctagaccaaagagtagctggggggacctagtcctgtccacaaacgggccagctgccataggaccccccgagccctcagggaccccaggacccgccctgtctaccagaaagctcaggacgcagcccacccaccaatgtgtgagcgagagccctgggtccagcagcgcatcgatcccaccctccccacctgccagcaggccagcactagtcctgggcccagcctcatccaccagagctggggcaccagacctggcacaaacaaggccctccagccagtgggtaggacacgcccacccaccagcagtctggcaccagctccaggaccccctggacctgctccccctacctacaggctgacaccaaccaagagtttaaggtacaacatagaaaagacagtctcttcgacaagctgcatgtaaaagttgaggttagaacattacctcacagcatatataaaaataaactcaaaatggattgaagacctacatgtaagacctgaaaccctaaaacatctagaaaaagacagaggcagaatattgacatacatcataactatttttttttggacctgtttcctaagacagaagagataaaagcaaaaatagataagtggatctaattaaaagtgttttcacagcaaagaaaacaattaacaaaagaaagagacaacctatggaatgggagaaaatatctgcaaatgatattagtgacaagggattaatgtccaaaatacataaacagctcatacaagtcagtatcagaaaaaccacataactcaataaaaaatggcaaagatgtgggaaaaaaagggacactgttgatggcactgtaaattgctgcagccataagggtatggaggttcctcaaaaaatcaaaagcagctatcatatgatttagcaattccactcctgggtatttattcaaagaaaacaaaaactaatttaaaaagatgtatgcaccataagttcactgcagcattatttaaatagccaagatatgaaagcgatctaagtgtccactgatagatgaatggccaaaaatacatggtgtgtgtgtatatatatatatatacacagacaacacagagaacacagtgggatactcagttcagctcagttcagtcgctcagtcgtgtccgactctttgcgaccccatgaatcgcagcacaccaggcctccctgtccatcaccaactcctggagttcactcagactcacgtctatcgagtcagtgatgccatccagccatatcatcctctgtcgtccccttctcctcctgcccccaatccctcccagcatcagagtcttttccaatgagtcaactcttcgcatgaggtggccaaagtactggagcttcagctttagcatcattccctccaaagaacacctacccataaaaatgaatgaaatcttgccattttctacaagatgtaatgaccaaagggtattatgctaagggcaacaagtcagacagggaaagatagacatagaatcgagaaaatcaaatgaacaaacataactaaacagaaatagaatcacagatacaaagaacaaacagatggttttgggggaagaaggaatcagtgaacaaaactggttcagttacaaaataaatgagtcacgggtaatgaaatgcagtctggagaatacagtcaataaatatgaagtatctttgtatggcaagagataccagctagacttatcatagcgatcatttggaaatgtatagaaatattgaaccactgtgctgtgtaccaagaactaacgtagtatgtgacaagtcaattactcaccaaaaacaaacaaacaaacttacaggaaaagagatcagatttgcagttaccagaagtagggagattggggagtgggggaactggataaagacagtcaaaaggtacagatttccagttttaactactttatctcacaactgggaacatactctacaacaggataatataactaacagtgctatactgtataagtgaaaattgttaagtaaatcctaagagttctcatcacaagggaaaaaattattttctatttctttaatgttacatttatatgagatgatagatgttcattaaatttactgtggtaataatttcatgatatatgtaagtcaaatcattatgttgtataccttaagctcatacagtgctatatatcaattatatctcaacaaaactggaatacaaaaacaaaaaaataaaacagtgtgttactatcaacaaggcactgacatctggggctgtaaaaagaaaataaaatgaagtcagcagtggctggagagctctctaaaacagagccgggaggccactgatgaagtgtgatttaacaacaatggcccagatggaatctgaacttcgaccactcactatcttaacggaggtatccatagtatgtgcccaatgttccagaaactcaaaatatttatccaacccttactctaaagtaactcgtgacagcctatttattaagagcaaatacttccttgcatagtggtcaaccacagttcttgccaggtaatgactttgtggctttcatctttataagactctggactcttttccactgtacaatctcgaactgcaaatcttaagacccccaataaattattttacttgtagccctctgcactttcttggtcgacaggactggttcatctttactttcaataaagttaagtcgagaacatccctatgaaaaggttaccctcattcagacacatttctacatgccccttgaaagtgagaaaaaacagtgtgcatagagctagatgtgttgtctgttgtgtgcccagccactcagccatatccaactcttggagaccctttggactgtaccctaccataatgtacacacacccaagccccatgtaaaactcctagtagacgccactgagaaacactgatagtaaaggttaaagagttatatgcaatgtaattttcatggataatataaagctgacaataaataaaatttaagttaaagaagtaagctagactttatcattggcaatgcaaacacactgacatattgattacatcatactataccatatagtaagacaacagaaaagcatgctgtccttcggggctacatcagctcggccaatctaacaaatgaaaagaccaccccaatttcagcaaggactgaaaaaatgctacgttggttacctttgaattgttaaatccaatggccacttttcagccttcattccatctaccctctctcagcaactcctaacatagttaactacttccttgctccttttagcttgcttttttttttaaactttcctctggtttcctagccctctgagcactgtctccttccctagctgttcattcattcacaccttaaatgctgatgctccctacagttttgtctaaactgcctcttctcctaaaaagaaaagttctctctgggcgatttcatccattcccatactttaattattacccacaattctaaatgctgatgcttgaatctatatttcatctaaacatgaattttcttttgcaactctcctggtttctacatactttgcctgaagaactccccctactctccaactggcaaaaatcttctcaggctttatgacctaatatattaccacctcagtgaagctttcaagaacttttccaaatagtgttagttactcttctagttcagaagtcatttcaactataccatcttgtgaaaaactcacaaaataggcaagtattatcataccctccctagaaataaaggcactgaagtctgaagagatcaaacaacttgaacaaagaaacattactacaagcagaaaacatcaacttaaactcaggtcttttcactctagatccaatactctttctaatatactgtgatgttctcaaaaaaaaaaaaagagagattcagaaattcagtagttttaccattgttaaaaaaactaattagtattgtctgtttctagaaattaatttctaattaaatgcttaatccaaaaacaaattattgataattactattttaaattatacacacacagctaaactggttaaaataagcatttaagacaaaagaaaacacctcacaccaatcagaacagccatcataaaaaagaaaactacaaataataaatgttggaaagaatgtgtagaaaacgggactctcctgcactggtggcaggaatgtaaactggtacagccaacgaggaataaaactaccatatgacccagcaatcccactagtgggcatctaccctgaggaaaccacagttctaaaaggcactgtaccccgatgttcactgcagccctcttcatcacagccaggacatggaagcaacctagatgtcgatacagaagttgtggggcggccgggcgcgggggagaatgtgtgtgtattatatttatttacatgtagcaatactattcagccataaaaagaaacaaatttgagtcagttgtagtgaggtggatgaacctagaatctgttatactgaatgaaataagtcaaagagagaaaaacaaacacgtattaacacccagtggctcagtcggtaaagaatctgcctgcaatgcaggagacccgggttcaatccctggatcaggaagatcccctggagaaaggaatggcaacccactccagtattctcacctggagaatcccatggacagaggagcctggcagactacagtccacggggatgcaaagagtcgaatatgactgagcgactaacaccttcacttttctttcaacacatatatatggaatctaggaaaacagtgaacctatttacagagaagacgtggagacacagaggtagagaaaagacttctggacactgcgggaaagagaggctaggagaaattgagaaagtagtagcattgacatatatatatactatcatttgtaaaataagttaactgtcaggaagctgctatataacaaagggagcccagcctggtgctctgtgatgacttagagggatagaactgggcgttgagagggggatgctccagagggagggaacacacacacacacacacgcgcacacacacacacacacgtgcacacacatacatatgactgattcatgctgatgtgtggcagagaccacctcaaaactgtaaagcaattatcctccagtaaaaacatcaccactgcagacactgtagtgaagactggttcaggagattcatacacggtggctaagtacaggggatggtggatcaactgaagagcagaacacctgtatgatctcaaactgtccccccataggtaactagaaaaaaatcctataacggggaaaattaacattataaaggcgggcaccctgtgcctcctgacacaaaagtctaagaaggtagtactgcagcctgggatatttaacaagaatcaaaacttgaggaacaccagcaacggcaaactgattaacatgctataaattggcttgtgttcttcaaaaatatcaaggcagtgaaagacaaaggctaagtaactattccagattaaaggagattaaagagatatgagaactaagtaaactacataatcttggactggattctacactagagaaaaaaaatgctaaaaaaattaaaagcatttactgggacaaaagacaacacacaattatagactgcaaattgtactaatgataaatttcctaaccctaacagtgatgcagttgtgaatgagaatatccttgtccttaaaaaatacatgctaaggtatgaggatagagggacatggggtatacaacctattctccaatgggtcagaagagacaataatacgaatgtgtgtatgtctgtgtgtggatggagaaagaaaaataaagcaatgtagtaatttttttaaaaactgagcctgcatcaagagtagttctctgtattattcttgcaacttttttgcaaactcaaaatcattcaaagtaaatcatcaaaaatgagaccagaggttgtgggagaaatgggtgaagaaagtccaaggcacaaagttccagctataaaataaataagtcagggggatataatgtacatcatggtaactacagttaataatactgtattgcatatttgaaaattgctaaaagtgaatctttaaagtcctcatttgaggcggtggggggggggggtggagaaccaaactgtaagtatggagacagatgttaaccagacttgctgtggtgataatttctcaatatattaaaaaacctactgaacattatggtgtatatctgaaattaacatgttgatgtcaattatactttgataaaaaaaatcagagtacaggatcagggtaagtttgaagttttttacataaattttgtcatttgggtttttttaaaaggcaagaaataccacatttttataaatgagagaatgtaagctcaagagaggttaagtgaccacttccagaacacaggtccctgtttctgtacaaccccactagtttgcaattcaatggccaaaatgtttctaattcctgaaagcctcaaggtcacacactgtctataactactaaagttttaaacttctaatgatttgtatgcattctctaataaagtcctgctgctgctgctgctgctaagtcgcttcagtcgtgtccgactctgtgcgaccccatagacagcagtccaccaggctcccccgcccctgggattctccaggcaagaacactggagtgggttgccatttccttctccaatgcatgaaagtgaaaagtgaaagtgaagtcgttcagtcatgtccaactctttgccaccccatggactacagcttaccaggctcctctgtccatgggattttccaggcaacaattatttccttctccaggggatcttccccacccaggaatcaaacccaggtctcctgcattgcaggcagattctttaccaactgcaatacaagggaagaccaaggtaccataaacttcatcaagcagcatatccaaatactcaagagaatgagctctgagatgagactgagttcaaactcaggcagcgcagtgttctagttctgttatcttaggcaaattaaccatttgtgctctaattttctcatctgcaaagtggaatcaaagtatctttgggttgctctatatcctctgtggcacctgaaagtcacagaatagttttccgtaagtcacactcactcagccagacagttgtcaggaggaccaaatgagataatcaatgtaaagtagtgtgcacaagtactcaaagtccgctatttttatttcaactccaacatgctcagtcacctcagtaacactggtcacagtcaaagccacacatttttttcaaaatcagacccaaatctgacaaaataggaaatgaaaggctctaagaggaaaacatctcagaagttcacaatccataaaagtaaatcaactgtaggcatatcacatgcaaaacagactctacagacttaaacattaatttaacagttgaaatatctgctaatagaacagaactgcaacaagcttcttgttggaataatccatcatctaaatgcatagaaggaaaaatgaaaaattactgaagttacattagttataaactttgctaacctgagaataaggaaataaacaaaaaactctactccacacgctccacacagatttcagttagcttaatacagtcaaaatgtaatctcaacttcaactactagcaatttccagaatgccttttaaaataaatttttaattacattaaattttaatcaaataaattatttaattaaataaaatgaattttaatttatctttctgacaccgcaaagccaccagcatagctactttaccttaagttcagcataaatctagtatcagcctattgtgttcagtaagtactgagaaatcaaaaataagaaaaaatgtaaaaatgattacaaaaaaatgcaaagttaccagaattctgtaagtttaaaatcactccctcttcctcaccacaaaaaaaaaaaaaaaagggtggtgttttctttccctttttcggtggtacttaaaatactcgtaataatttaaaacacacacacacacgtatacattgtttagggctcattttttaaatccacattatttgcaaaattgtgccacttgcccccactctaaatattctcctcatccgcttcttactgtttccgagctttgttttttggtttgggggttgtctttttacttttggtggggggttttgtttttttcttttttggtctgtaatgcaaaagacattttccaggaacactggtgtctgaataaaccagcttgttcattcataaagcgcctaaaacacctccttgcttctacactcaagggtcacagaacagtctcccataagacacaatctaacttcccctcttagctccccaaacgtgactccttccaccctagcgagagaatttctccaggtgtcatcaaacaaactttaagctagcctgaagtgtttgcgcaaaattcagactcctgggccccagaccaactcaatcggggtctttgggggtggcaccgaagcggtcccaacggttctttttcactgaagtctgacaactcctagagaacccctccacactctcaacccaaactcaagggattccgcggcagcaagccccgctccgctcccggacggtctcacggcgaccctgcccctgtcccgggagccccagccccgcagtcccgtccccacaccccaaacctttctcctcacttcttcatatcgctgctgaagaggccgaaggcgccggagggggaaatggctgaggtcgcctcctgacccagctccgtcgcctccccgcctcccgactgctcattgtaagcgaagctgttgctggacatcgctgcggggtcgccgggtgtcgagctggtcctgcccggggttctctctgacggcctccggtcccagcgactggaaacaaaactagttctcgtgcagagaggcgcgcgcaggcgcttccggactcgtcaccgctcccgcagccgacccggcgggccaccccctgcgcatgcccagtgtgcgggcggccggcgcccaaccccaccccaccccggccactcccgcgccggactggagttcccgcctccgggcttttgaggtagccgagcggctcgaacccagcctctgcgctaggcagaccctcagcgggctagagactaagctctttttagagttttggtggtggggtttttttttttttggagacagatacccacgtatccattttggtcccttaggagattccccgggcccggacacctcttttttggattcttgttgtaaaccagaagctttcagatttctcctggaacaccgtttaacacaccaggtcaactttgct

SEQ ID NO: 150 - DNA, 34459 bp, Hippotragus leucophaeus
  source 1..34459: mol_type = genomic DNA
ctcttccagcatctgctcctgccaatccttggggctctgggacccgcactgtgtctggaccccgtccctgccctcttctcattgcgtgctgccaagattagaaatgaggggtttgagtgtgctttcattgcacttaaactttagtggtatttccactcatcctgcacaacctttaccagaggggttccctggaaagggacagcagttgctgggccccgtggagtcctgtgaggggatgggtatcaggtgtcttcttgctgttactgctggggcccaggagcccagaagaccacacccctccggaggggtaagaggtacaggcagaagggcaggggcgacctagcttcacagttcaacctgtacaagggtgccctgtggcccgcctctgaccccgagtgctgcaagactctccagaagtctggctgtatgctgaccccccacattgggggagaatcccctactcagggcatacactgccaaaggcaagagacccaatggataaacgcctgtttcgcaagtttattggatcatcttgacacaaaatcattacagcagcatgatatgtctctcctttacacgggaatgtcgatagcaaataaattcttatataacacatcatacaatttagagattctagaatcactgcacaggattctgtaataggttactctacatgctaaagtgacagttttcatcaaaagaagttaaaatgtcattgaggaccatcatctttgaggaaagttcagtctcacgggggtgggctggggtcccccctgcccctgatgcgcatctcaggggcccagccacccccggacccatgtgcttccagcaaggaaacagggccaggcccgggccttccacaggtgcagacacagacctgcagagcatccagtgacgacaagggagccagagctgtagctctccaccactcaccatagcacccagctgggtgcggaggccaaggccctggatccctgccgggcactcccctcagtggatacacaggacacggtggtggaacaaacaggatgtgacggacggcagcctgcaagactctgccccatcgtgtgtcctggggaggacgtgcccctcggtgtggggtgaagaggaatgtctccctcgagcagctggcctggcctccactcccagggcctgtgggcagggatctgggaactcgtgggattcggacgacttgacagaagtgagacgtgccactctgtctggtccccatccagcccccgccaggtcctggcctcgacagcggtcacgctcaccctcgggcagcccatggccataggcacagtccgctccagccagaggagccttggctggcttggggactggaaagggctgctgctcgccagagagtagagagaagcaaagtaaaaaagatgacaaggtaaatcaacgtaacgtaaactgcgaggtctacacagtggacgatggtggacttggtcaactcctggctggacccagtgtgtgcagcacatggccaccctcctgtggcaggtggcactcagcacgtggccagcgtctccttcatttcctccagcaggttgctcagcagcgtggggtcgctgcacttcccatccactgacaccgacttttcaccctgttagggaaatgacagccggcactcaagaggcgccaccctctggacatcctctcctacttcagggtgctctgataaccctctcctattctggggtgtttgataaccaagaagaggggctccaggtaggacagagcaggcacaccacaccccatatctcccacgccccatgggaggagctgtaggacctggagaggccagaaccgcaggggctcaggactgatgctctggcaaaggcagagatcccagccctgcaaaggacacacagcccctgcctggcccagcccctcaggggcacagggaacagctgagtgtagcaccagatgtcctgcagatggaacctgagtgccaaccttctccacaggtgtgaagaaggcccacagactccaattcaaaacttccaaaataattcggcactccaagaccacggaaatcttagctcacgtggaaaagacaacccacaaatacccacggagaagagatggatgtcagaatcacctgacaggctttaaagtagtgattccaagaacctcccatcagcaatcacatacatccctgaagcaagcaggagaacacaacatctcagcaaagaaaaggaagaaataaagatcaacccagggaacttctagactggaatataccagcggcacacaacagaacttgcatgacagaagagtctatgaccctgacaagagattaatggaaaggatccaatctgaacagaccagtggaaaggcggtggaggtgggtgaagtagcaaagattctcatcacagggaccggagacagagaagacagagaaagcagtgctaaaaaggtacttaaaatcatagctgagaactgagttgtgcaaaagacagaaacgcacagatcagcacattcaacagactccacactattaacagcagctaggtccccttccagggaacccctctggtaaaggttgtgcaagatgagtggaaatatcactagagtttaagtccagtgaaagcacacttgaacccctcatttctaatctcggcagcacgcaatgagaagagggcagggtcaggggtccagacacagtgcggggcccagagccccagggattggcaggagcagatgctggaagggaggccctgcagccgtttcaattccctacgttcccaacagctttactgatgccacgtggatggagggttgtgtcagcagactgcccagatcaaggaagtcaataccaagacatgtcacaaactgctaaaaccaagaacaaaggaaaacctgaaacagccagggggaaacaatgcatttcttcataaagggaaaacattccctgttggaaaccgagattccaaaaggaaatggcctagttctgaagcactgtgtgagaaaaaaaacagcaaagcaaaaattctatactcaccaaaaacagccttgacaaacagtaaaacaaagaatgatcggattaaggaaactgagagaactcacacagccaacagacctgatctaaagttctttagacagagagaaatgaggcagaagaaagggtggaatgagcagtgaaagcgacagaaacagtaggcaggcaggtgagcagatgaggctgtcttgtctcctgaggtctctggaatctgtaaagctatagtgcactgaagaaaggtgccttcagtgtctgcagaggcaaaacctgagaccacctcctatatagggggagggtcaagggtaagcaagtgtgaggttttcatgttgagctccaagtagactttgaacaccaagggtggggatatagtccccacagctccagacacacagaaactctgttaacatatcaacgtgagacacgggtaacgctcacatatgccacagaaggcgagagcagaaggatgaaagaaaagacacagggaacaaactaactgcaagacaaacccaaaaatatcagtaatactttaagcacaatgctctgaacaatacaactgaaagagactgacagaatgaataaggacacggtatccataagaaatcctttccaatacaaggataaaagcaggtttaccacaaaggatttgccacataagcacagaccaaatcagagcaagagggcttccccggtagctcagtggtaaagaatctgcctgccaaggcagaggacatgggttccatccctggtctggaaagatcccacatgctgaggggcaatcaagcccgtgtgccacaactagagaatggcccatgcagcaacaaagacccagcagtgctacaagtaagtaaataaatgtgaagtgaaagtccctcagtcgtgtctgactctgtgaccccatggactgtacagtccatggaattctccaagccagaatattcgagtgggtagacttttccttttccaggagatcttcccaacacagggatcaaatctaggtctcccacactgtaggtggattctttaccagctgagccacaagggaagcccaagaatactggagtaggtaagcctatccccttttccaggagatcttcccaacccaggagtccaaccggggtctcctatacattgcaggcagattctttccaactgacctatcagggaagcccaagtaaataaataaacgttattaaaacacacacacacacacagaatggctgtactgacaccagacaaagtggacttcagagcaaagacacagcacaggacagagacgaacacaccaactgctgaggggatccactcgcccagacccacgattctaatggcccacagtcagtagaccagctgaccaccactggcttcatgttccctgctcacttgtggaggactggcagagagaaaatctacaaggatctagaagaatcaaaaacagtcaaccagcaggatctgggtaacacacacgtatcgcaggaacacctacagaacagctgtccagagggaccacactcaggacagagctccagtctcagcacctttcggaggcctgagaggtcacaccagaaaccaagggccaggaagcaacagggaactctcccaatgcttagaaataagtccacaggtcagtgaggaggtagtgatagaaatcagaaagtatctggaactgtatacacatggaaatgaatcataaaatcctgtggggttcagctaaagaagtattagagaaaacttcctaacattaaaaactttattagaagagacaggcctgttggaaaggtctaagttttcaccttatatatttgcaaaagagcaaaataaatccaaagcaggcagaaataaagagatatgcagcaatattcagtaaaattatttttttttggctacacctcattgcttgtggggacttcccaaatggctcagtggtcaagaacccacctgccagtgcaggagacacaggacacctgggttcgatccctgggtcgggaagatcccctggagaagggcatggcaacccactccagcattcttgccgggagaaccccatgggcagaggcgcctcatgggctgcagcccaaggggttgcaaagagcagaacacaactgatcacacatgcattgcattgccattgcttgtgggatctcatttccccaaccaggaatcaaacccagtgcctggcagtggaagtgcagagttctaaccactggacctccaaggaattccccaactcttcaaaaaaattggctactaaactgatcttccaaaatggataaataagccttttagccaagataaccaataaaaaggagaggagacaattaccaatatcagcaatgaaagcttatcaccactgatccctcagatactaaaaggaaaagaaaagaaccagatgacttgacccaccatcacctccataatccagatgaaaccaaccacttctttgaagactacaaactactaaaactcacaccgtaagaaacagacaaaggaaagaaccctaaaagtatcaaagaaagaaacaggattttcctggtggtccagtggataggactccacctgccaatgcagagaacacagattccatccctggtctgggaagatcccacatgctgaggggcaactaagcctgtgtgcctagagtccgtgctcctcaacaagagaagccaggcaatgagaagcccttgcaccaaaactagagcgtagcccctgctcactgcaactagagaaagcctgcagcaacaaagacctggagcaaccaaaaataaatttttaaaaaataaagcagttattaaaaaaaagaaactgaacttgtagataaaaacttttcagaaaagaactccccagacccagatgctttccttgaattctacaataatatgccagaagaaacacactgactaaacatgacctcttccaggagatacgcaaggagggaacgggccaggcggaggaaaggccgacactgctcaggagcacagggtcagagccttcagcaaaatcatctcagactgagctcagagcagagcagctccgctggaggacagtggtgaagctgggcaggccctccagaccctgagggctcaccttcttcaccaggaggcagacgtggtggccctggatggagcggctgtacatggaggcgcaggagtccactcgctccacaactgcaagagagggcgatgtgaggctgggccagccccaggcagtgggggagccccgtgcgcgacaagaaggccaagcaatctatcagctatgtccagtcttaccagaaaaacggtgatgaaaacagatctttgccaagagattatggaaggacatactaatgccatccactttgatcgagctcatgctcaggtccccagactccagcaacttggcaaaggcatcgctgtgggaaggacagagaaagggtggcaacagggggcgccgcccgggggtgggcgcctcctctgagggcctgtggctcagggtctgcactggccctgtaagaagtcaacacctgaacagtgtccccaaagcccctaagtttcagccctgacacccaggccgtgggaatgtgactgggtttggtgacagaaccccaatgcaatgtaataggagtcctggtgtgaacgggaggtcaggacgcagatgtgcgagaaggacaagcatgtgtgcccacaggggagggcagccatccgcatgccactgtgcaaggcctcaggaggacccagccctgtccatgttctgggtctggagtccagggtccagtccagggagtgatgccaggcctgttgtttgggctgctggggatgtgctgagcctgaggtgccagccagtcacctgacaccgcgcccacatcctctcctcaggtctggagcaccccctggtaggaaagcagggagctgggggcaggagggagggcagcgcacctgtagcacggtgtggtgaccaggtacgaggtgcaggtgaagtgcagtttgaagtcaagcttctcgtgggttgagccttcatcgttctgtggggcagagggggtgcagggtgagggggtgcagggtgagggggcgcagggcgagggggtgcggggcagggccttcgagctcgggtgcatgactgacccttggggcaccccgccccataccttggcaatgaaagacagggtccccttgagcttctgggccatgacgatgctctgaatggtgaacacaaattgggcctcgttggaaatacctggtgcgggcaagacatgggcctgaggagcagtgcaggatgccgtcacctgggcaggcggcggggagttaaggctgccagggtctgtccccagcactgctgtcccaggccgctgagccaggctcactcaccaggaggcagctggaaaggcacggggacaccatcgtggaccgaggagccctcgggccgggccagccgggcattgagtgagtccagcacattgagctccatgctcttgagaaagctgtcgctctggttctccaggaccacggagactgtgacctggctgtccttctgtaggctgccctgcacgtcgtacgtctgtagagcaggacccggggtcagtggggagccactagggaccccatgcctagagagtgtgggcaccccctcatgtccagagaaaggagccctgagcctcaagcactcttggccccacctcctgaaagtcaagcttcgcttaccatcttgatgtaagaattttcagccagaagggtatagctggacatggactgtggacaaaagagaaacatgtcagctccgggcagtgaggacctgagagtgatggtgagggttgctggggcccccccactcaggaaacatcaggagcgtgagaacaggggacagggagaccccacgtcccagaggcttccagcaccggctgggttgggaggaccctcaccgggaggggctcctcatccagtgtgccgttctccacgggctcagcagcctcctcgtccgtcggcagcaccttcttcttggacttcctcttgtccttgggctgctcctccttgtctttcttgtgtttcttcttcttgtgcttggagggtttctggagcagaaacaggcttgagtcagccctgcgctcctctgacgagccacagcccaacagcactgcgcgattaggacccagcgagcttggcaacaagagactgctgttaggagccccagcagtgcgggagtgccgcccccagcccagcacccgcacacgcacccccaccttctccaggtcctgctccctgtcctcatcggcgtcctgttcctctccccggggctcctcctgcccctcctgcaggacagtgactgtggtgttcacctccagctcttcctatggggggccaggccggggttggtggtgagggacttcaaaggcagccaaggcccaggatggggagtcctgcgccccctgacctgcctagccctggaataccctgccctgatgagcctccctcctgacggtgtatggccccccctccaagtgctggtggccagcagacaggagaggaggcctggcatgaggctggctagcactgacccagaagaccccagagccaccaggccccagacacagaaacaaagctgctgcccaaggctgctgcctggctctgagacgaacccaccacgaaaccattgcctgcacaagaccctgagcatgggactaagccagcgcagacctggctggtctacctgagatcaccccacatccctctgcccccagtgagtgggggccccttaatgcctgtaagctatccaaggctgaaaagcatgggtgtccagctgaggagcacttgcagtcagcacaagtcacaaccaggctcttaccggggctggtgtggcagcaggtggtgtagtagacagccagaagtccaagtcctcaccctgaaaccacaggaacacaggcctttagctggagaagctagaccggccctgagaagacatggctgccctgacaggcataggacactatgccccacaggacctgagtgcgctgggagacaggggtgactccagctctcttgccatgggtccaggcacctaccggaaccacacatccaggcaaagtcgtgttgctctggagcgaagtaacacaacctgtgtgtggtagctctgccgaaccctccctccacgtgcaggacatgcaaactatgggggaagggaggttgacagcccaggacatccctgccccaccccatctgataagacaagtgagcctagcctctcaccttctccaccttcttcttcttatcccgctccttctccttgtgcttcttctcctttttcttgggtttcttgctcttcttctccacgagggggacatcctctttctcaggggacttggaggtctcagcgtttctgtgtttctggacgggcagcttctcactatcagctaggggcctgggggtggtcacaggatgagtggcctgggatgaggcctggagggaagtagctcactctgctgccgggacccttaccccaggccatgctgagcaatcaagagaggatagggggagggaccacaatgtggggaacccaggccacgtccagccccatgggcagctgccctggccttactcccagtacttacttatccaggtcgatgtccagggccctgtaagggtcattgggatctttgtcgtcctcgtcactgggcagggcgttctgagggatgacaggaatgctgtgtctggatcaacccaccctctccacaaccccactgggcccccacctccctctcagacaaaccagcaggtccacacccatgagagcatctgctctggggcctggcgctcagcgtgagcagtggatcccacagttaatgaaacagaagtgcaggacatgctcacatcgcacagggcagagctgaccaggggcccgggggcggggcggggcaggcaactgacctcaggcatctcctcggtgacaatgtccacacgctgggcaggtgcaatgtcctcatcactctccgtgtgcagcgagctgtgacgccgcgtgccccggcgctcgcgctcccgcttcttcttcttccgtttatccttctccagccgttgccggtgccgcctctcttcctccagcttcacgtactggtccgataggggcatccctgctgggacgtgggtgctcaccccacagcctgagagccacgccctgcccctacctgggggcactgccctgactactgggatgcagacagggggcccagggcggtgtggggctggacctagggacctctgtacacgccccctgctggcaggggaatgggagggaggatgctggctggacagccagagctgaggcaggtctgaagctggtctgcaacaccctcaccccacgcagacacttgcctggcaccttcaagggcaccgagaggtcaatctgcaccacggggatgtgctccacgcctggcgtgtcctgataccgctgtggggagacagcaaggccggtcaccacgcagggcagagggcccagcatgacgctgaagctgcagagcagggctcatggagaggggcaggtctgtcagtgcggggagtataggacgggagcaagacttgcccgttttttcatttgaatcttttttcaagttgaaagtcatactttggaagcacagaaacacagggcttcctgcctctggaaagcgggcatcagcaagcctgacacatgtggagccatgtctccctgagggagcccaaagcggccgataggtctgctggctggagggggacagatggtggcagtggcgcctgcaaaaaccccatgtcccctgtgctcactcgcttcccgctaaggcagaggagcctgagctcaaccacacagaacttgctccccacttattgctactgggggcccttgtggtcctgcccctggacctgctaacagcctcacacagcccagggatggagagcagatggggccctggcccgttcctccagaacaaggagtccagccttaccttctggggggacggggaactcttgatgtagaacgggttgttggcctgctcttgcctgcgggcctcgcggcgctgcgggacaggattcagtgagcacatcagtgggcgtgcggagcgctcgccctgcaccctcccagaccacctgcacgagccagacctaggggacaggacccctcgccactttcactgttggctttggaccaacagagagggaagccagcatggggaggggtggggaggggtggagaggggtggccagtgggaccccccgggagctccatggctggggcacggggatggcccctgcaggggaggagcagaggagggaacaatgcacatctcatacccaggtccgcacgtcgtccccaggccccacacccaaaagcgcaacggtcaggacccacggctctccctggggagctctggcccaagagaacaagcccacccaaggtctgcccggaggggcatgggccacaggccagagcgacctccctgcctcacccgggccagctcctgctcgtctgcctcgggcgcccgtggcttggtgtgtcgctgttcctcgtcctggaacatggccttgggcttctcatcctcagactcgctgtccgagagtggctcgttaatccaggcatccaggtccaggctgtgggacacaggggtcacatggtggctctggcttgcaggcccggccctggacagtgctgtccccttggagaccaggacatgaaggccaggcagcggccgtgggcagagaggacagaccaaggatggtggagcttgactaccccaaggtcaacaggcaaggaccgcccacttaccttctcagggacggcaccagggtggggacagcagaaccccagagaagcagccaagcaccctgcactgtctgtgtgaggagttggcctcctgatctcagggaacgtccttccgttccctccaccactactagctggacaaaagcctgggggggccctcatgccacctggccccaggtcctctaatggccgcacacttacccttcggggactggaaccttcttctgtgccttgggagccaccgggttcagttccccggcaaagagggcactcacttcctctgccaccggcacgtccttggcctgaagcttctgcacgtgcttgaccagctgcaagatgcaggatgcctgcgggggccccagaggagtcaggagggggccccggaggaccggccctgaaggccactcagcctttacagggcacagcacacacagacacctcgctgctcctgactagagcctggctgagaatgcctggaaggctctatgaggagccacttggccatggggcctagccagaaaaacacagacctgttgccatctccttcagaattagtgacagaaactgggttctgaccaagataaagggttacggggctgaagggtgtgccaccccattgggcaactgctccaagaacatggcccccgacctctgggaggcaccagggtgccttctctcggctccagggatgtgaccacagccaacccgggctcgcggccctcagccgacagacaagctcatgcccaacacctgaccacgactgcagagaccactggggcctgcattaccgtagggctcatgaaacaggctgccaggccaccagtgcgcagctgccactccaagctcccgtgaaccagctctcctccacccttcctgttggcacccaccaggatccgcggtcacctttgttgcatctccctcgggctgaccactcacattccacggcctcctgctccctcaccgtctcccatccccactgacccccgccaggctgctcctatgggaccacctggggcctccccagcacaggggctccaaactggccagccctgcacccggccaagaatgaggaaccacaaaagggcccccccttgaactgccctcagatggacgagccgctgctctcacccgctcctggacctccaggtccgcactctgcacgaactgtggcagccgctccaccaggagctgggtgacctcctgggctgcggacgcatctgccgcctgctccttttgctgcaagatggccgcatacagcttgaccacgttctgcacgtataccgcctggatgtgtccaggcagtgtggtgaccttgggccgcagcatggcctccagtgtctgctggggctcctgcaggtgtctgggggatgggagggttggtgagtagccaccccaacagctccatgtcccgggctcctgccacccgctgtgatcccccacctggcgctggggctcagggaggggacctggaggaagagaccacggccaccctccactcactcggagaactccccgcaaatccaggcagccgcgtagagcacctcgcagatgccgctgcgctgcgggctgctggccaccaggtgggcgctgtcaagcagcgcggacatctgtgccacggcaaacctgcggatggccttcacgcggatggccacatccaacatctgtgcggcaatgaggtggccgtggcgggtgccctccagccgcgtcagttccacgaggatgctgatatacctgcgggacggggtctgtgaagggccccgccagccccagcgccaccccaccaccctgcccccggccccgccggcccacaggccgcaccactcgaagttggtgatgtgctgatagttggactggctgcagatgtcgatgatcttggtgagcagctcgtcacggtaggttgtgccctcagccttgtccacgtgggtcatcagcttcttgacgatctccattaggttcttcttggacacctgggggcagcgatggtgagggaggggccaggccggcaggggggcagtgtgggcagcagggcaggcacgcaccattccgtacaggagatcgagggcccgcaggcggatggactcatccttgtcgtccaggcactgcagcacgagatccttgtgagcctgcacagacttggggtgcgtcctcaggatcttggacatggccaggagccccaggtacttcactgcagagacagtgggcagttgtcacacctgtacgaggttcaggggcgaggccaggctgcagctacaccccaaccacctgggcactgtcggccacatctcccaggcaccaggctcccatcactgccaacctctagcaccccaaacacacgactgtctatgccaggggcagccaactgggccacaggtcaggtccagccacagcccgtatccacagcagcatcactggcacgtgacatgcctgccagcacccaccaggcaacttctatgctaccctggcagaaaccatatgacctgcagagttgatctgagttactccctggcccttcccagaaaaaatttggtgacctctgctcaaaaccaacagatctggagtgccaccaggagtgcctgtctggttaacctccaaggagactgcaggcccatggggaggtctgccaatgcctggcctgctcctcccggggccttggcgcacccttgacctctcccctgtgctgccatagcctccccacccctccctgcagtcaggtcctgcctccccatggatgcgggcacagggctgagttcaaagacactttcaatgggcaaagggctgagccatacagcgagacaccagcccactgtgcagatgtgtagtggcacccccaggccctgcagagcctggagggacgagcaactcacagttctgatcggagtcttctatcagtatcctcaatttctgaacgcagagctgcaaagagaagagtaatactggtcacatctacgcccacatggagttgtggcctggagccaggaggggagcctgggtcctgggacatacctggatgctggcgctgtggttgggcatgccggatgacagggagatgagcactgaaacagaccactgggtgagggcccacgtgactggcccggggagcagaccacagtgcccggggacccagggcccctgttgggggcaggcccgtgggccaccctgcctgggacctgctgactgtgaggtgcgatggaacaggccatctcctatctgcatactcactcactctgcccatggccaaggtcagggctgtctgcgatcccgccccacctcggtcctccctgtggaccttcccacacaaaagggccactctccagccagcctcccctgctcccaagtcccatgctcgcccttcgtctctgtgaccgttgctgatccttggtgatactcacggcccatgctgtggtcatgagcgtgggcccgggaccagcttcctgagccttgctgaacttatagttgcctgtgggtctctgaggagcagcccaagctccgggcagggacagccaatgagacactgaatcctccggccaccacctccctctgcccacctataggaaatggggctgcagggacaagtgacccacagctaacgggctctagcagattgtgtggggagggcatgcaggtaccctccaaggaccctcctggctgcagctcctatacaggacaccacacgagaagcagcctgaggcctgctccagaatgctcaggaagacggtcttgctggtggtggtgcagtgtttatcaatggagcctgaggcagcaaaggttctggccacagcagtgtccagttgctgacaggtccacagggccaggccaggcagcttgccaagtgggaacctcaactccaggggtgtctgcacctgctggtgaggtcctgggaacagccccctagccggcgacagcaccctgatccacagcgggtcaccccagcactcacctgcgatgacggtgttgacacactcgtaaagaagggacatggcagacgtgctggagacggaaacagaggagccgggaagacggaggctgcctgcctcccattcaccccaacaagatccccagggaactgtctcagggaaaataccgagcccagggactcatcttctgattctgtgaaccccatgaagagaagccaagttccccaaagggccctctctagcagcccagaccccaccagctcgtttcactctgacagggaggtggcctgacctggcaggaggaacacagagtcgcaacccaccctacccccctgccaggtcactcaggcaccagatgtgtccacccactccagtctgatattctcagtgatgctttagttcaaacccccaaaggtcaagagaatgggccacgagagtcgggccacaaaacaggtctcgagattgagggcctcacatgaatgctttgaaaaccatggctacttcataatgactgatgatttgtttcaaacaacaggggcttccctggtggtccagtggttaagacttcatgctcctaatacagggggcccaggtttgattcctggttggggaactagatcctgcatgctggaacacgcagttccatgtgaacaagagttcacattctgcaactaaagactgagtgccacaactaacacccgtcacagtcaaataaacatacaaataatagcaaagccaacagtgtcctgagccattggccacctcccaggggatcccaggagcacgatctcctggcacttggaagctccatccccatgattcaaccacaggcaccccaagttccctacaacattctagaactaggtggggacacggtcacctcaggctattcaactcgaccagtgagaacccctgtgcaccagagctgagcaggacagctctccccactgacctaattgtggctgtttgcagactggggaaaggagcgcccaaggacatggctccaggctatggcagacctgtaggcctgcttgccactccccccatccctcctgagagcgccctcccacaccggccccaggcctacctgtggatcaggttggtgagaggctcgatcagcttcttgcccaaccttggctccaagggggtcagagcaccaaactaggggatgaagaggctgacggtcactcacagcagggatgggacagtggtctggggccctcaccaaggacacccagaggccctctggcagtgggtggggcaggccaggagaacacctaccagtttgataatcttaatgaggacccagttgttggtggaagaggtcatgagcttgaaaaagagcggggcaagggaaaggtagttcttggggttgcgtctggccagctcacagatgacgttgactgctgccgactggactcctgagaagggagggcccccatcagtaacagggtgtcctccaaggcaggtggccccccacgcactgtggcctatgggcacggctccccccaaccacctcgaggggtgtccccagagggtcagtcactcaaggtacaggacacccaccccacaaaacaacatcccaaggagcgaatgcggggtctgccggcccagaagcaacatcaccccaggagaggaatgaacacaaacagcacccagggcttggtttctaaatcccacaccaaagacacaggaacagggtggtctggagaagggcggactccaggttggtgggaaaatagaggagggtcgaggacagggtcccaaggcctagcacccctacacaggccctcagttacacgggccccacagggcctttctaactcaaatcaacataccagggtcgggatcctccagcttctccttcaggcgggggaaggcagggcgcagggactcagggtacttcaggaacaccttgtacatgatcagcaccgccttcttccggatatacggcttggtgtgtgacatctgtggggcagacggcataggtctccctgctgacgcccctgtgccctgcacccctcacctccttatctcaccttctactcccggctcacctcctgctcacctcccactagcctgtctccctcctagcccccaccccctgctcatcccccacccccctcacctccactccctcctgtgttcatctcccacatctgcctgcatctcatctctataacctgaaggaaaactctctctccagcttaactggctcctggtctctgagccctgtctgcacatttactctactgccctcctccccaccaagcccaggaccacacaacagtgtcttagaatcaaatcctgccttcctgagtccatgaccccagcctgccctctggaggccaaggtccgcctccactgtcagccctggccatgagctccattggtcaccgagacctgtccccagggcaggatgctgctctgcaccccaacatgggaccccagagctcctgccctgctttcaggactgtgctctggccacgagggcctcttgtctgtaggtgggcacactcctcacctgttggggccctggaaacctggcctgagaaagctgccctgccctctagacccagcaccaagacaaatccctaccgccctcctgtgggcgtgtgactaccgtcacctgaccaggtcctcacgcctcctgaagtgggccagagggtcagtactgttggctttgtcagccagggtctctgtacagtctgccctggctgctgggaagcccagggacacggtattgggcaaaggggcgggagcatgtgtggacacatcatttacaacaggccccggacctagaagctgactctactcacagccttcaagactgcaaaccaagactggagcacccacacagcaaacaggctgcgtctggacagaacgctccgggagggacgcaccgccctcgcacatgctgtgacatggtcagatggggagcctcccaatcatggagaatgaggtgccggcgaccctcagggccatgaggtctttgttcttttgtggttgttttagagtcaattccagtttcatttctctttctttcttatttttactagagttgagggctgcgatttctaagaacacatccacatttcacaacaaggttcctgcccgccctagagatcaaagctggctgggaattctgcttttcagatgaacagagccaccagacatcagactgcacccaaatgaagataaaaggtgtcctggacagagactacctgaccgtgctgcccgctgagaccactaccactgccactcatgcctcagtaagaacacagctgatgggtcaagcgcccaccaccacccccagctagaccttgcccttccggagaggaccattccagaggagttgaggtgaaagtcgggcccatcaggtgatggagggggagacggtgactaggtgtcccagctcaccccaggaacccaggctgtttccaccccctgaatgccctcagcatgactttacaaccaggttatcctggcacacgaggcagtaaaggcaaggggagggcccactcccagactcaccagtgtcatgatgtcgttggccaggtctctggcaagatctggggtaacaaaacaggataggccagtcagcgcaacgccagtgtcatactggctggggctgctcaggtcctggaaagggaatgcgagggtcagaggcgggtgctgaccatggcttgctgggccccaactgtgcccgccagccctgccctgggtctggagacatgtgggacaaggattcatgaggagcagccagttccgctctgtcaccaagaagagctgggatggctctggggggacagaggcgagggctgcccctcgctccaggtgtgtaacatggcaaaactgcagaacccagggccctgaccgcccagaggcacgcagcgggggcccccacagagagacacccacagatgactcctctaggcccctctgcaagtgttgagaagcctccactggagtcccacctctcagggagcggagaaccagcagaagaagcgcaactgccctgcctgacgccccagcctcagttcccgctgacctgcgtggaagccccgtcttggcacagagaggggggaccctccccacacttcacatgtgtaacaggtgcccccagaagtgtctgaagagttaatctcctagactgtggtgatggtacaaaaacatagggtcttaaagttcactgcaaccctggatgtggagactgggcctcacagcacatccctccactcagagtgacttgcagagcctgacacgggcagcagccacacctcacggtgtgtggaggcctccgggcaactcctacagcctgcctgccccacagcgcctgcccgggagcccagtcacctgtcccctgcagggtgaccacaccagctcctgggtagcaggcctcccccagccatctgaggacccagggccacaggctcatggcagttctgtccaggaagggtgcctctgatggccccctgaccactctcagcaagaactgatcaagtccccgggctagggcagagcagagcactcattgctctcaccacagagctgaaaaccactcagggccagagagacacaccagccaatgcccagcacccagtgggcagaaggtgccaccccctcagcaggttcccccacgagagggggcagggcttgaagagtgactaggggcagtccctcaacactaagagaactcaagaggagggccacacatgccgcccaccactgttgtttccgaggagggtggagaccatccactgcccactaacccccactctccacatgctcccatggtggggtgagaggcccctaccttgcggatctggttggtggtcagcatgatgacgtcggtcccttcgtgaaagcactgggaagccgcgaggtagccaattcgctgtgagtgcaacaaacagaggcgtcgggcacaaggggagcgggccacgcagccctggctggcccatcccccaccaggaagaggactccccgccccaagtgcgtggtctctggaacacagtggctgtcaagtcagccagcatggcctgtcactgcccttgcacatcctcatcgcctgctcagtagctgatggaatgagtctcacaaacacgggataaccatgggctcccacctctgtggctggggtagcctggaggcacacccatacacaaatgtgtgacactccaacacacgggcagggcactagcccaaccttggcaaacccagcatctcatttcctctctaggagaaaccggtaggcagcatgaatgaccaggtccctcaggaggacacagcctcagcctcagatgcctgcagggcgtgttcccagggagaaccatgggacgcccctaaataggctgccggtggtggagactgctttccaggacatttactaaagcgggagacaacgtgttcagttgttataatatcaagtaatagaaaagcaatatctcaaagtggcatgagtaggctccatcagatgaaggcagagggtgctgagaagcaccaggacaactgaccagtggcgggctctggggggatgatcagtgcctgcctgtggtggtttttttttttttgaaaggttacaaatttaatttgtatcacaaaatacataaccacccctaccttaacttcactgacactacttaaaacagaaaagaaaacatggtgttaatggtgctaagaccttgctaggcagatgtatgatgggaatgggtctccagtggttgccactgtgtcccctcccagcccagcctcatcacaggacacacgccttccctcccccaggaccccacccagggggttcaggacccacagcgggctgtcccctcaccttgaatgtgaacttggaggcgctcatcacttcgatgatgttgaaggcagcccagctgatatcgtagcccagcatctgcagctgtggcaacagagccagggtcttaggctcctgcccagccccctcccccaactccctgggcccagaggatgaggagacagatgaggagagacagggtctcagcccccgcccgacagagcgagcggccagcactcacataggtcagcttgcagaccgcgttggctttcactgcgatgttgtcctgcttcagctcctgcttgacttcatcaatgcactgagagatgtactttgcctaaaacaaaaaaagaaaaattgaggagctgcgagtgtctggtttccctggtagctcagttggtaaagaatccacctgcaatgcaagagaccccaatttgattcctgggtccagaagatcccctggagaagggacaggctacccactccagtattcttgggtttcccttgtggctcagtcggtaaagaatccagctggcaggagacctaggttcgatccctgagttgggaatcctttcccctggagaagggaaaggctacccactccagtattctggcctggaaaattccatggactgtgtatagttcatggggtcacaaagagtcagacacaactgagcaattctcacttttaagtgtctggctgaaacctaagacagacacagaacacacagtgtacacttccctcgatgggaaatgtccagaagaggcaaatccagagacaaagaatgaactcctggttgccagggccagggagtggggaggtgtctgctaacaaggatggagtgatggatgttctggaattaaacagaactctctgaatgtactaaaaaccagtgcatcatacccatgagaacaaggagtcacactgtacgggtatgacaacatggctgctaccccgagaaatcctgtcagtgtgatgaactgcccacgatcccccatgggccctcctcccgaggggcaggcggggggctggggagaacaggagcagtccccagatgagctcaccagcatgttccagcccctgaaggacttgtgttcgtggcccatctgagtgagagggcccacacaggccccctgctcgctctggggccaagccatccagacagtgtaggcacatgagggccgctggggggtggggactgtccacctccagcccttgtggcccccaggtcctccaagaccagccaccctgggcaggtggcgctgcaaattcccctagggctccccatttctgagttcgtgccaccagcagcctctcctgcatgcatcaggggtctgtgtgcagcccccgccctcctctcagtggcgctgcagtatatctgcgctcggctccacggccaccacgtgtccatcctcccagcagggcagggctcggagccctcccagcttcccacttttccgacacacgctgccatggggcagggctctatgcggacacatgttttcaattttcctgggttttctgggtttctagcactcatactagaacaccaatcaaaagcctggactgacacatgaagcccagagcaaggaacgtgccccatgagacataaggctcccatccagagacacgcacagatgttacaatggcagtcgcaagaaaacccaaacctgccaacatggagtccagttgtcaccaggctgtgggggattctggtgcccgccccgccttcccaagaggaggaggagcctttgatctgaccaatagcagggtggccagcacagcagccctgctccccgtggatacaccctgcatccagtgtcaccccagacctctgggggctccagcacaggctcctggggaaggcgcccccagcgtgagccctcagccagcgtctgatatatattccatgaccgagtcggacaatggaacacaagtcaccagatccttccaacgggcttccaattactaatcccctggagcctcagtcccatacctgtgcagggatgacccctttctgcaccctggactggcagttaatgatttaaaagggaaagagcagagagaccatcccaagtgtggagaacctggccgagcacacagccctgcagacctgcttctgcagtgaaagtgacgtcgctcagtcgtgtccgactctttgcgaccccatggactgtagcctatcacgctcctccatccatgggattttccaggcaagagtaatagagtggggtgccatttccttctccagaggatcttctggacccagggattgaggggcctcccacactgtaggcagacgctttactttctgagctaccaggggcagacgctttaccgtcagcagtgcccaggggcaaacaggtgctcacaaacatgctcccatactggcacctcaacacagaagctggtcagctggtgaaaggccagcacaccatgctctctgcacatgatttccaggcggcctagggaccccttggcttagggaggccaggcagagtccgttcctgctaacatctgtgcagccatcctcagaccaagcctcccgcagccctgtctgcaagtgactctcccgcagcgcagggcaggagagaccactgggtcctgccccagctttgttcctgggcgaatgaagccgctgggaagtgaggggagacaggaagggggcggagagcctcacatgaaccctgccccacggaccccaggaccccgtccccaccagaataccacacacagcctgcactgcagcccactgcaggcacacagagccagagctccagcccagacaaggtcaccgccctaaaacacacccctccctgtaaaaccaacactgcagagaacacaacagaatccagagtgtctgcaacacaccatccacaatggctgggtcacagtccataattattcaaatttgaaacaggagggcttccctagtgacttagtggtaaagaatccgcctgccaatgcaggagacaggttcgatccctggtccgggaagatcccacatgccacaagtcagctaagtctgtgtgccgcaactacggaagtccatgtgcctcagagcccgtgctccacaacaagggaagccaccgcaacgagaagcccaagcagcactagagagcacctcccactctccacagctgagaaaagccgcgcagcaacaaagactaaaaaacaaaacccctgcttaacttaaaaaaaaattagaaacaggaaactataacctatatccaagaagaaaaacaaaagatggccagcaaagaccaaccctgagatgtctctagggatggaatgaacatatagagctttcaactcagctactgtacccaggctctcagggccaaaaagaaaatgtacttgtaatgaataaagagaggacgtctcacagagaaagcaaagctacacagaaccatcaggtggaaatccggggaagggaaacagcagggactgaggagggacggaagctgaggagagaggtggcagcatgacggtgggacaagagcgacgccttgaacacagcagagtcagaaaagggtgcaataaaggtgcagcaagcgcacgcctgagacccagggaaggaagggcagggaaagcagctggaaataagagctcaagtctacccaaatctggtgaaagacataaactgacaacttccataaacctagcgccggttctccgcaatacgaaacacaaaggaaaatcacacccagacacatcacagacaaagtgccgaaaactgagactacggagacagtctccagagcagccagaggaggacccagagggaagccctgagctaggggaggcgggggctcagggctccccacccgagaccgtccctcagagatgaaagcagagtaaccacccccccacagcgaccctgcacctcagagcaccccctggggcaacagccgagcccccaaaagtgactgacccaaggaaggaagatccttcctcaacactaatgttcagccacaacacaagtgcacagcgcacaggcttggggttcctacaggcaggacagggaggaaagaactgtgaaatattagaaggatatgcttcactcaggagtgtttacatatttatctaaaacagagttacacatacgaagttaaagtaagaaacatgggagaaaacggtatattagtctttgtagtctgatttacacgcaacattgctaacaatgaagtattttttctcctttttacaaagaagaaaaaaaaaaaaaaaggccagagtatacaaaggatctagatccagtaaattatacaggcagatgtaggagatattgtagggagggtcccagaccaccgcaatacaacgaatatcgcaataaagtgagtcacacaaactaagcggtctcctggtgcacgtaaaagctacattcacactactctgttgtctgctgaatgtgccacatcattgtgtctaaaaaaacattaagtacacaccttaattaaaaatactttattgtgggacttccctggtggtccagtggctaagattctgagttcccaatgcagagggtcagggttcgatccctggtcagggaactagatcccgtgtgccacaaataagacctggtgcagccaaacaaaatttcattgcaaaaaacgctaaccatcatctgaggcttcagcaagccatcctttttgaggggatggggcaggatcttagttccctaaccagggatcaaacctgggccctcaacagtgaaagaacagatcctaaccactggaccatcagggaattcccagcaagccatatttttgctggtgaaggtcctgccttcattgtggactgggtggtcacggcagattcttaaaacaagtcaacagtgaagtctgcagaatcaatggcctcttcctttcatagatggtttctccatcatgtccaatgctatctgatggcattttacctacagaagaacttcttcacagctggagttgattttcccaagcccttatcaatgaagctacataacattccacctgtgttatcacttccacaaatgatcgtgccacgtcttatgtgggtgaggtccgtggagccccaagacaattgtgagagtaacaccagagattgctgaccgcagatcaccatcacataataactgaaaattcgtgagaattaccaaaacgtgactcagagacacaaagtgaaggaatgctgttggaaaatgtggcaacatgcttgctcgctgtggggtcatcagagaccttccatttgcgaaacacgcagtacatggaaagcatgatcacagagaaagcagtaaaataaggtctatctgtattaaaaacaaaaattagaagctattttaagatcaaaagtatacatgactacgtgttcttaacacttgtttcaaaaacagaagttggtgatgcgaacatgatgaaattctcaccccctgttctgagcagccacacttcaccacggagcacacaatgctgagatggatgtgcaaccccgaatttatccagagcaaaggacacacgcctggtatgaacccggcagctatggtaaaatagccatccaaccctgtcttcttagaagagccccctgggtcacttaagacaccccaagattcccagaggagtggggtcagaccttgaggggttgacccaagaagctgcccttgaccctgatgggttggcaggatcaaaaaccacacacctggaccagggagtctcttttaaaaaagacttctttttttaaagcagttttaggttcaagcagaactgagtggtaggtagagattcccggctcgcccgcccccacgtatgcacagcatcctcaacagtgcgcatctgtacaatcgatgaactcacagacacgtcattacccaagatccacagctggtgtcagggttcactctgtgggtcctgacagatgtatgtacactgacaggcacccagcatcactgtatcactgaacagagtcactgccctaaacccctctggccccgcccatccgccccccccttccccataaccaccgatccttctacagagctcctccttttccagaatgtcccaaagctggaatcacagtgtggagacttttcagacagtttcttccgcttagtcatgtgcgtttaaggttcctccctatctttctggggcttgatgacttctaacccaagtaaagcagcattgtcaggatgatctgtccacctcctggaggacatcatcttacttgcctggtccaccaacatttccaagaggttctctccgaatcgtcataaatatgtgggtcttgccatcaccctcggctgcctgcagggtccccagttcagagcccagagcccctccaccctgctcctgtaagcagcagtcctgagactcctgggggagagagttgctggacatggttgaggtcaccaccagagatggacatctattacgacaggggaccagagaaggctgtctctgtcactccatctacgttgccagcaacagccagctgccatctactacgatcatcacttcagtaagaaaatacactttaaccccaaaatgtaggaaaggcaagtcagtgtcagaacaggagaattctgacaatgtacaagctggcccacaatgagaacactccacaagggggggtgaacccgtcttgcctgtgcccatcacaggcccaggactcagcgtggatcagctgcaggggccgcagtcaagcctcagacttcccaacctcccacaccatctctcagtgaggtcccagagcaaggttcccagagaggcgaccgtgccccgggggatgccaggccccacctgggacatccgtgttcatcaggactgggggctcctggcacgtgaaggagccagggaggctgctccacactccagtgcccgggatgcccctccaccccgaggatgactaagtcctcgtgtccccagtgccggagggggatcccggccttgagcctgccttagccacctgcagtctttcaacctcctggagccctcacgcagctgggtatccccaggggccacacagacccccttccccagactcggtcctcacagctgccgccacccatggcatctaggcctagagtgtacccttgaaaactcccccagtcaggggaaaaatgcacagaaagaggcccaaatcctgaagagacagcttcatggagtcagcaaaaggcgccacgccaagcagagggaaggcagggaggccccggggctgctgctcgaagcagaagccatagcagccctcgtggtggccacgacccaagaggacacggccagcgaggacacagccagggggaggctgaggctgctcccgctcccactcccaccacagcggcccaccctcctgtacacagcggcacataaatgcccccggtgggaaacaagccagatgtccagcaatagtccaatggataaaggaaccctggtgtagacagacaacacacccctgtcggcgacggaaatgaacaagtcatgatggctctttcccgtggcagagagtgagagcggccgctgcagatgaccagaagcaagcaacactgtccagggacacacatattaagggagaaaactgagcaaagcaaggaaatgacacgcagaaaacttagcatgattactatcaccgtacttaaactgtgtaacgtttaattcagtgcaggtgtgtcacattctgcacaactaataagaattagagaaaaacagcacaaacctggaagacacaccctgtgggctgcctaggaaacacggaccatcctccccccaaccaaccccgtgaccctaggggggtcccacaactcagttgggttctgacacatactgccaggagtcagcacagaccccacaggtctgcccccaccgcacacaccaaccagctgtaaatcagggttcccagaaccccccttgcctcagggaagcacttacttatgttttccagcgtattacatagtaagggcacaacaaagccaatagacggacagctggccaaagaggcaagggggcagggcacagggcccagaggtaggatttctgccctcacagcaggcggtgtgccaccccgcacacaggtgctttcaccaaccaagactctccctgaggcccacacttcagagacttttatggaggcttcatcacaaatacatgacccatcataaactccacctgcagcccctcttccttctctagaggactggaggggagtgtctgaaagttccaagtttcaaaccatggcctggcctttctggtgccccagtcccacagagagtcacctcatcagaacaaaagacatcccatctcccaggaaaccccaagggactcagcagcttggggccagaaaccgggggcagaaactaaacaccccaaccaggatgctcccagttacctctgttgcttaggaagctacaaaggttcccggagctctgccacaggagcagggacaggcctccttatctcacaacagcatagggtccaacaacacagtgacagcacagggaacaagggtcacctagatgaaggggcagcattaaggaacccagagaacttttccctatcaattatggtcaggggatcccacgcctaggggacactggggcgtatctgggaacactgtgattatcaagactgggggaggcctggcatcacacaggtggggccagagatgctgctcaacaccccacagtgcccaggacagcccccttcaggactgacccagactgaagtcagcagtgccaagggggagacaccctgactcagggtttactaaacttcctatctttagtcttctcaggttttaaaatagaaagtcttacagaataaccaaaagcaccgcaccagacgcgacacatgcttcagtaactgtccctagggcaagaagcggcagccctgcacgcacctcacggcccaaggagccccagacaccctggcaagggctgaaacccaggaaactgcatttctgaggtcagagaccctagaataacagcacttcgtacagttcaatcttaatcccagattatgcccaatttcaaaataccactccacagttaacccttggtgttgcaggggactggttccaaacccccaaagacaccagaatcctcagacactccagtccctcctatacaatgaactgctacatgacgtacacacatccttccgttcactttaactcattgtgagatgacttacaacacctgacccaatgtaagtgctgtgtattcaaatagttgccagtgtgcagcaaattcaagtcttgcttcttggaactttctggaatttttaaaaatatactttcaatcctgttggtgaatgcagaacctatggatacacacagccggactatacacaattaggactgaatttttcaagttcagaaaccagttgagtaggttagacgcaagctcagaccccacacaaaaactgacaactgcaaggtgccacctgatggagtgagctgggacacagacagagaaagtggaacccacttgattgctggcgggggcggggagggggggcggaggtgtgcacccacactcagagggttggtcctcaggagcacttcagggacgtggacagcactcaggaagggctgccaccataacaggggagaccagcacaaaaccttaacagaatctccctcaagttctatttacagaaaaaaactctccaactgatttctgggaagaagtattttatcttttcactttcataaacactgagcttattataaaaagttatgcatataattttaaaaggctgaaagaaaaggttttcccccaaatatgaaaaatactcataagaattcaacattgaaaatcatttggttttttcctagttatacacaagtttcagaagcaaggacactcccaagtgaccttcctcacctgcccacatgacctggtgctgtattaatatacactgaaactcaagcaccccagaaagatgggaatcagcccattatttttcaaacttctttgactcactgtaaaaagcatgttttccatggtaaccccactcacaggcatgcacatggcttactaccccaagcagaagcaaaagtttcacagttactctgccaggggtctggactttctagattcttctttggggagctcacagaagcctgcgttataggcactcaacaagattgggggagggggtagccgtccctcccactttacactagggaactctccccttactcaaacaggactaagaacctggacttgggtctcacaacgtcacatgctaaattatggtgccattccatccggcttcttttagtcactgccaagcctcacttctatggtgccacaccaggagtttaagctacaatctactgtaaacagtaaactctgagggaaaactacactgctgccagtcttcctaggaatgggggatggtttgggagctaagagtaaccccagagctgcctgctatgctccccaacatctggagccagtcatgaccgaccagatcacggctcttctgatgagggaccctcaaatcctgagccacatcctgtgggaattgcccacaggcttggacagcatctgcgtggaacccaggcaccaccaccatcaaaatgccaaataatgggctccaagcctgaggatcgagccatcagttcctaccaattccaagtgaatagagcacgattcagggcactgcccctgatgacaggcttgcaccctaaaaagcagacaccctaactggaactcgcatttctccagggcaaagaccctcaacccctcctcagaatctcgcaacacactgctcaataacacccactaccagaggggggggtatctggaggtcaaccagcgcagaaaaagaaatctgagggcacaaactccttccacatatttgctttgccatgccctggggtctgaaatgcaggctgaccagctattctttcaaagagaaactaaagatcagacaagagttcactattgttgtgaccagcagaactggccagagtgtctaacatgatgcaaaacctaggtgcagccaaagaagggaaggtgggcgagttacagaaatgaaccaaaataacctgattacatttcagcgaggtcacacccattctgaaaaagtgcaacagaggcaggaactcaagctctccgaaggaggacagtgcccggggctcttggtgcctgccagcgaattccttaatgtccctgcactttcctctcggctctgctggcttccccggcgccattgtgagggccggccaggtggcacctggtggtgggacctgtccgacagctgctctctatcggggagcctcactctcaggcaaggaaaaggggacttgctccaccttccattgtgtaagtgcaggtttgggtctccctctccggaagccagcggtctggtggtcacttaactgtccccattcctcctaaatctaggtcacaggtttcgcggtggcgggagggaagaaaatggtgcccactgttacaacactacttctggaaaaccttttcccctctggctttcgggtgtctagttgaactctgcttccctattccaggactcctaagctgcttccttaattcggcctagaacgtcggctgccccaccccttacccgctaggaggggcggccccaccttctgggggactcgagcccaggaggcaaggccaattccggaccagacaccggggggcaacctggacgtgcgtttatcccagaaggagtttcctccgggggcggcccgccgaagaggagggtcccccaacaaggagtccaaggcctggggcggggcagggggctctgcattttgaacaagagatacagaaacacattcaagatcggagatccgccgctagcgagggtgggaacctgcgaagtctctttccggccacccttggggagcgggagacgggcccccaactccaagaggataaactaaggctcggagaaagaacgggcagagatacggaggtcgaggccgcaggcaggcggggctccagccgggagcagggccgcgggggcgggcggggggccggagtcaggggcagagccgggaacagggtcgggtcggactgggtcagtcagggcgagagtccgagccagggccagggtcggcgcgctgggatcacctcgtcctccttgtggttgcggatgccgcgcaccagatcctgcagattcttgtcgaacatgcggtcgatgctgcccttgaccatcttgagggccatcgcggcggccgccgctgggctcgagccccgggaggcccacggccgaccgccctgagggagcccagcggccgcgcttgccgcccgcggagcgctgtgctgccggccgccgcggcggggcggactcccaggccaggtcggcggcggctgacggggcggcggcggcagcgacccgctcggcaggccgcgctccccaccactccggctccgcgccgcgccgcttgcaaatggcggacaagatggcggccggtcagctgacggcgggagccccggcccggcggcccgcccccggaagccccgcctccctataggccgtgactctgccgcgtttccctgacgacgccaggccgtccaatggaaaagcagacaacggcctccgggcggcccagccacgccccctgcgtgtcagcgctcttccccctcataggtcagtgacctccggaactccacctacttccccgttccggaatgttaccacgccctctacgcgcgccttcttgcaccgcccctaaactctgtgacagatgtgggcggggcccccacgtggagcttcttgaagaggttccctgagaagaacctagctccgccctttctgattctaaaagctgacgttgtcagagaacctccaaatgccgctctgcggtggactggtctcgtatgtcctgcaagtgtcacaaaattctgtgatatggggagtatataatatgcgcagaaagattgaaggcaggaggagaagggcaataaagtatgaaacggttggaaggcatcatcaactcaatggacatgactgaggaaactgggagatgatgaaggacag

SEQ ID NO: 151 - DNA, 33127 bp, Hippotragus leucophaeus
  source 1..33127: mol_type = genomic DNA
tctgattttgtcactaatggactgggtctttggctttgcatttctggcctcacccagggggagaatggtgcctggctggtgagagatgtctggaaaacacaggagcagtggctgcaatatgttcccaatattctaattactgatgacatttactcagcagcagttgtgggacagggaacagaaagttctgtgggcttgcagcctagatgacagaacacaaaagaacaactgggagattctctctctcttgctttgctaaggtataagaaacaatactatttcagctttacaagaagaacagcaagagtgatgatctctcgttttatagacaagtgaatagaagcccagagaaatgcacttttcccaatgcacagaatcgtgtccccagcctagactggagcacccatcatttttctgcatgtgtgttctctgcccgggtagttccagctctgtccgatctcgggtctgatgtttgcgtccttcattccatgctggttgtgtcactgcaggcgcaatgtgggtctccagtggagaaagttccttggaaaggagtcttgagacatttgaaagacagaagactgtaagtagacaagcgggtcagggtggggggtggccccacctgtgctggcccttgagccccactgtcctcacctccaaggacagagataaatggtggttatcagggctaaggaaactgcttcccattgttcagtcacataacctctctctagactctcttgtgtacaacaggccttgttattattattttttaaattatcttgtaccactactgtttgtagtttcttctttcttgtttatggtaattcctttgggaagagctctagttctgggggacactggcaggtgaaacctcagcttgtctaccttttctactggcagggatgccctcggccaagcagggcaagtaggtgctatcactgagagcccttgcctttcaaagtgctgggagttttcatgtgaccgcccccactctggctggtcctttttcacagaccttgttcatgcctttagtgcttctctccccaaaacagcacctcccagggtcctttcaaagataagatgcttcatctcagtttttcatagactcagaatctctaaggatggggctgtaggtgacagtttgggacacttgaggagacaggcccctgataacccaggacaaaaactgctgcctagttaccatgccaggctcactgcccccttcctagttgacagagctagggtaaggagtgaggaaaagtccaggctttcagaattaaaaacggctggaaccactggttggcgttcttttagcctgggagtgggagaaacatattttctctttcttgggaacttgaattatgaatggtcccatgcaagaactgaagtgtctggaggtaacttgccctgaaaacactgtccattggtttctttgacctggctcctttcatgtccttcagggtcctatcctttctgaggcttgtcacatggcttatcctttgattctctgaggcccccagaaatctctagtagactgccctctatctcccctactcctttgtttctcaggctaacctttttggtggagcctcctaagactgtaggatcctcaggccagagccttctggccgctggacccacagcaatgtccagtcacaatcagacaccccagcttgtattcacagacccagaccccttagggcagacagcacagtgagactgggtatggagctgtagtcattttgtttttgtggaggtgaggggagatccttagaaggggggtagggtgaaagactgaatgtgtgctcaattgtgtccgactgtgacccccatggcctgtcgcctgccaggcccctttgtataccagacaagaataccggagcgggttgccatttcctactcctactccagggaatcatcttccctaccagggaccatcaaatcgacgtctcttgtgcctcctgcattggcaggggagctcttcaccacagcgccgcctgggaggcccagcagttccttaacggttgctttctccctccctgattttggaggcagcttcgggtgtcccgggtcagacggtaaagcgtctgtctgcaatgcaggagagccgggtttgattcctgggttgggaagatcccctggagaaggaaatggcagcccactccagtattcttgcctggaaaatcccacagatggcggagcctggtaggctactgtccatggggtcacaaagagtcggacacgactgagcgacttcacttcgggtgtccctagggttaaaggtagggggcagcactgtctctggcggccagatccagaaaagcgcttaccaggagtgcagcctcagggctaagcaaccgcgtttccccaggcccgggagacagcaggtgcgcagctcgaggaacttctgtggtgcaggggactaggcgaagggaaaagaatagttcgggttccttacagaaacagccacacattttcgagaagactatatgtatttggattttagcccaacccttgcggagacttcctgaagccccgccccaacgtcaatagccacgcccactccgttctcggaagcccctcctaccagagctctcccgccccagaaagaccccagggtcccgggagccccgccccgccaccctgaggcgtgctcagcaggtggggttgagcacgcggcaggagcaggcgctgcggaaaaagcggcactggcagaaggcgcacgggtcgcagcaggcgggcgctggaggcttgcagctatcgcgggtggccacgcagggggtaggcggcgggggccgggtccgtgccacgttcttcatcggcgcctttctctgtggggaaacgccggggctccctgagccatccacgtccgccccactcgtcctcacccctgcctgggaactcctcggactagacttccccacctgctgtccaccgcccgctcgactcacgtccacagagcactctagcgggtccctgccatcaacacttaactggctcgggcctggcctcttctcttcctacgggatcccactcagctgcacggtttttaacttccatctctgttgtcttccccttccagtgtatccgcaatccctgttggttctgccttcagggtaggttcggagtctagccactttttcactaccgctgaaacccttgggcttggccactgtctgctgcccttgccccctttctgtccagtctccagcgcacaagggactaagcacatcctcccccttactgggatccctgacgccctctgtggtttggcccgcctaccactcccacgggtcttaaacacactgctccacccgcccgccctctgtgcaccgaacacagcaaatgagttcttgttgcaggcgctttgttttggggcttcctttcctgggaacattctttgctatgctgtccagtgcaggcagccacccaccatctgtggctgctgagtactttaaaggtgtctagtgcaactgaggaaccgagttttcaattttaattttaattaaaatttaaagaggaagtaaaatgtttcccattaaagacaaccacgtcaagtctgtatgttgtcaccctgcttatttaacttatatgcagagtacatcatgaaagacgctgggctggaagaagcacaagctggaatctagattgccaggagaaaataccaataacctcagatatgcagatgacaccacccttatggcagaaagtgaagaggaactaaaaagcctcttgatgaaagtgaaagaggagagtgaaaaagttggcttaaagctcaacattcagaaaatgaagatcagggcatccggtcccatcacttcatgggaaatagatggggaaacagtggaaacagtgtcagactttattttttggggctccaaaatcactgcagatggtaacttcagccatgaaattaaaagacacttactctttggaaggaaagttatgaccaacctagatagcatattcaaaagcagagacattactttgccaacaaaggtctgtctagtcaaggctatggtttttccagtggtcatgtatggatgtgagagttggactatgaagaaagctgagcaccaaagaattgatgcttttgaactgtggtgttggagaagactcttgagagtcccttggactgcaaggagatccaaccagtccattctaaaagagatcagccctgggtgttctttggaaggactgatgctaaaggtgaaaaactccaatacttcggccacctgatgcgaagagttgactcattggaaaagactctgatgctgggagggattgggggcaggaggagaaggggacgacagaggatgagatggctggatggcatcactgactcgatggacatgagtttgggtgaactctgggagttggtgatggacaagaaggcctggaatgctacaattcatggagttgcaaagagtcggacacaactgagcaactgaactgaacattgtttttttaggactgtatttcactagtgttaaaaactaggcattggaattgagagtgtaaaagtcaaagacttagagcaaaaaaagtaaaatattaataactttttattttggttacatattaaaatgataatatttgggatctactgggttaaataaaatattaatattaattgcacctggtttttttttttcctcttaaaaatctgactactagaattttaatttatatgtgtctcacactgcatttccattgaacactgcggctcaagattacagagtttctcagtcttttaagtgctgcctccttctagagaacttcccctgaccacttttccctttcttctgtctcactgccatgctttcattccttcacagtgtttatcattatctaaacagcactggttaacatgctgttctgtttctcccagaagagtgtaaactccacgagagcagttatagtctcccagaagagtgtaaactccacgagagcagttatatatctctcttgttcactactatattcccagaatttatgtaaatagattttacagttctgtcaatcatctgatctgcttgttcactttacaaaggctcaaagagaacagggaactttattgtgatcacagtgccaggtcatgccttccaatgccttgtacagtattcccggctctgtttgcaatgatctgatcaaatgaggcacactaaaataggaacactgtgcatttccacagtgccttaatctagtatttcttgaacctgtatcatggtggtacaattttaggcagtacatgaatattaaatgacactgaatcacacagtgagagaggattcttttttcagtctctttcaaatggaaaggctcagtttgatgtcaatatatccttagtgtttccccaacactttctaatccttctttgttaatgcagagagcaagtctcagatttagaacttgtggcaagcaacaccaaccagctagaatttgctaacaaggttttattttcattttactattttcatggttacttcctatttatgccaagtgatactggttttctatcatgattatatagttttttttggtttgtttttggctgtccagagtccttgttgcttcgagggcttttctctagttgtggttagtggaggctactctctagttgcagtgtttgggcctctcactgcagtggcttctcttgttgccttgcatgggctctagggcgcacaggcttcagtagttagttgcagctccctggctctagagtataggttcaatagttgcagcgcacaggcctagttgctctgaggcatgtggtggtctttccgacccaaggatccaacccatgttttctgcattggcaggaggattctttgccacagagccaccagggaagtcctgttacatagtatttttgttttcaagttttaaacaaatattaaataagtggaactcagatgtggtaaaagttgtagaaatggttctgaaatgactgaggtttgggaaacatcgcgttcatccaaaagaatgaatgacagtggaatttcaggcagggttcgagctagtttagaaagtttgagctagttattttaggcagggttcaagctagtttagtttgctgctgctgctaagtcgcttcactcatgtctgactctgtgcaaccccatagacggtagcccatgaggctcctccgtccctaggattctccaggcaagaacactggaatgggttgccatttccttctccagtttagtttaggtaagcaattttactcagcatcctggacctcagctcttggcggtctgcctcagggatcgaggtcaggaaggttttggtagctttcagtttctctggggcatgcaaccctggaaatctttcatttagtttctggccagagcttggatgtcctccccctttaagcccagccccatcccgacaatgtgaactcccagccctaccttggaaggtcttttcttcttttccgcttcatttctgctgatcttcttggatttcttgttcagtgcttcaaagagagacagaaggaacaaagccattttctgagggtccttaactgcagtgaagagggaacagagagggctctaggaagccccagggttggggagaggatgaaggtttggttggatagatcatatcttgggacttaggccagcagcttctgcagcctggctgcagacctggagccagagactgacagcaaagagtcctctgaaggaaagcgaaagggaaaatccaagaaggccctggaaaatggactcagtatctctacaaggatggtcttgtgtttctggtattcctatttcctatttctcagagctttggagccaggcagacctgatttgaatcctgactctggcacataacagctttgtggtcttggacaacctacttaatctccttaagactcaattttctcatatgcaagtaggtactgtaatacctaccttgaagagttgtgaggataaatgaggtatgtttatatagtggaaaatctgacacagatcaatgttaatgtgctccagtcccttcccatatatctagaatatcctctttttgaagtgagaggcaagtcagtaaggaatattagttttgagcttagattctggagttaaacagaacctaacccagaacctgggtgtgtattcagttcagttcagtcgctcagtcatgtcttactctttgcgacccatggaccatctctgccaatcacaaactgtatgttagttacttaatttttctaacttttaatttacttagctgtgaaataaaataggaataaaaatagtattcacttcagagtgcctatcagaaaataaatatatatgttattataattattgtcagatgaatttgaaccagaaattctccaatgctaggctctaatacccctgatattttcctctgagcagtcattttcaattctcagccctggcatgaaagaactactttctcccagacttgattatattctgcagcattttctaaatattttaccattgataggagttacgtgatttagtaagtttcagaaacgccaagttaaaccaaattcaccaagtgtcttgactttatggtttctcagagcctctatcatgctaagctgcatattagattggtgagaggcagagctttcttaaccaaacgagttaagggacacttgattcctccagaattgttctgaggaatgagcacaaaggagctctgagcgatagcaatggatcctgatatcggcttgaggagtgtttgaccccctgtagccccttctcatgggccagagcccagaggctgggccccaagccaggctacttacccacgatagagacagaagggaaatccaacaggttcatggaagagttgttcttcaggttcctttcatctctgggcttttcctcaggtgccaggtggctgtaggcagtgaggaagcacaggcacaccagcaaggtagccaggaggaggcggctgacatccatcccaggaggcttgagagtgacagagaaggcagtcaggtgggccaggggtctggcaaatgcatgtgccctcctgctttgtttctttgggcttgtgctctgacccccatcccacagcccagtgtcccagtggagctggaggaccagcaaggcttaggacagggaaggagaactcatgaaggaaaaagagaggaaaggagagatgggagaggaagaaagacaaggaagggagggagattgcaaagagaaaaagaatgcattgcaattggtctctaccttccaaagggtggggtgctgtttttctttcattttatgtcggtagctccaggagatccaaggcctaagcagaattgttgacaggtccccagtaatgcctcacagtggcagaggtcttactaaagtaccgagaataaagctcatgagttaagactcaagagaaggtgcatggataaatggctcctttagacaaatgtgtatgtcattgcatatgctatattctgacatccagaggaaatgaatgcaggtatgttttgtgtcagaaggataggatggacctgttcacataggctagctagatttattgatttattgctagctgggttttgatgaagaaaacagatcccagagtggatttcttcccacaaatgtctgtctgtctcaatcagggctcacagtttcagcatcatcttaccgtctctgaatgtgggacccccactcctcacccaccctgtgcatgttcttgctatcgtatctggacttattagttaggtggcgctagaggtgaagaacctgcctgccagtgtaggagatgcagaggcttgggtcaggaagatcccctggaggagggcatggcaacccaccccagtattcttgcctggagaagcccatggaaagaggagcctggaggactccagtccatagggtttcaaacagtcagacatgactgaagtgacttagcatgcacttgaggcaatatattccctttattttcttaagattttttttttatgtgaatcattgttaaagcctttatttgtaataatattgcttctgtttaatgttttggttttgggctgggagcatgtaagatcttagctcaaactcacaccccttgcattggaagggggagtctcaaccactggaccaccagggaagtgccccctttattgtgtgtatgtgtggagttttctgttactctcaactcaggacattctaaaggatattttcccttgcaaatagtcctgttgttacattttcaggtgtttaacgttagactcgaaagcaaaaatcgcagagtacagtttctccagctggcaaatgatggaattttttttttttaatttcacactggaataagtaattggcttgcttctagggatcatattgtataaaaaaaatctttttctttgaacaccaggatcaccatcagcataatgaaatgttcatactatgagaggtgtctaggaactgagaccagctgaaggaaaagcatatccgcagctcccaattctggagtggctgtctccttattgcacagcaggggctctctggataggagattgatcagaatcgcctgcatatttatttagttttaaaatgcatttattttggctgtgctgggtttttgttgccgcacacaggctttctctaacttcgtgagcaggggctactcttccatgtggtgtgcaggcttctcgttgcagtggcttctcttgttgcagaacacatgctctaggcatgtgggctcaggggtggtggtgcctgggcttagtggctccatggcatgtagaatcttcctggaccagggatcaaacccatgtgccctgcattggcaggtggattcctatccactgtgccagaagggaagtcctcgcctcgcctcacctgcatatttaaattgcttctctccactctctcacccactcactaagtacatatggttgacattgcataagttaactgcgagcatgatctggcttcactgtgctttctatctttgtccaatcaccaccccccacagtcaagaatgttggttttaatttttgactctttcttccctgatctttacatctgatctcttaccaaatttgactttatgctctctttaaataatcttatattttccacttcttcttcactccagcccataccttcttttcagtggaaccagttacactactcctccatcaggaggcctttgctctggcttcaacaacattatccactctgctgctgctgctgctgctgctaaatcacttcagtcgtgtccaactctgtgcgaccccatggatggcagcccaccaggttcccgtgtccctgggattctccaggcaagaacactggagtgggttgccatttccttctccaatagctcccccaatcacattttatccttccttcagggcccagctcaatgccagcactggcacatttctctctcagtttcaggttagccccaatagttctctcctttttctgaactcttccgggtcttaaacttaataccatatcgtttagtacttcattgttcttttaagtgttcatgtgggtcatctcatcagttagacttggttctttgtttcaagagcctcatggttgccttccagctgctgtagctctgctgtcatacccacctattccagtttgcctctctgcctgttttagatgccacttgaattctaaattcttggccaaccaaaaggttcttctagcccagttcagtctaactagagccatcagcgttgcctgggatggctagttggttaggactgaggaaaactatatttgaatgatttcctccattccttccttctcaactcctgggccgtctcttcctcgtaggactcccttctctctctgatgctgctgctgggctcttaacttggagagcagtttccttctctcttgttccccacatccaatcaatcagtcatttgagttctagtgatttttattcctcccatttctcacaaccatttctccctccctttccattccttcagtccctagtggtctagttcctcccacttggtcttccataacagcctcctcattggccttgactctagaacatatcaccagattaagcttccttttaaataacgtcccatttccatgcattcatgcattcatacatacatattcattcatctcgttgatagggacagataaagggacaaaaggcttccctggtagctcagctgataaagaatctgcctacaatgcaggagaccccagtttgattcctgggctggggatattcactagagaagggatagtccacccactccagtattcttggggttccctggtggctcagctggtaaagaatccacctgcaatgtagacctgggtttgatccctggattgggaagatctggagaagggaatgtctacctactccagtattctgacctggagaatcccaagcactgtatagtccatggagtcgcaaagagtcagacacgactgagcaactttcacaaagggacaaaacaggtcattaaatagttaatcccactaggggattgtaagtagaaaaaatatgggagacccttgtattactcagattaaaaaaataaattactcagataaaaaaaaaattaggtttgcttaaccacaaaaccaagcaggcttgcttagcaacaaaaccatacaacagaagtatgagacatgcccacaaacaattaaaaaatggtggcatgagacatcttgtccagtgagctcaataagttaatgattccctaggacatgctctctgcacacataaaaaacaataatttgtggacctagcttggccacatagaacaagaaaattctcttgttcaacctagaggaggagatgatgatggaaggatgacatctattcaagaaaaataaatttcttctccccctctctacttttactttgattataaaactgcaacccactaaattcttggggtatggcaccctgtcaccccctggcttgtaagcctcacaagcatcctattcaaataaatcatttcttaatctatcacttttcctcttcctgaattctttctgcactgaaacataaaggactgtggtacgagagctcttcagaacccccccaaatgaccccaaatgctttcatagtgaaaagtattagttaagtacctactataaaccagtgctatgctagatttttgggttacaatagtgatcaaaatacaaaatgatgcctgtccttacagaccttagatctatcagggatggctgacaagttaaataagttattctaataaagcttttgccacaggaaacctcagctagtgcatagacttggggaagttctcagagccagctgcattgaaactgagaacagagggctgatttggatttatccatgctggagaagagagtgaaggtggtgatggcagtgttccagacgctgagagtggtgtacaagcatgaaaatctaaaggcaagagaggatggtgcatttaaggaactagaaaagatcagtaaataaataaatataaatataacaggaggtggaggcaggggccagatcatgacaggacttttaaaccatggtgaggaatttggacaatatcttcaagacaatggaaaatgaatgaagagttttgaataggagagacttaatcagatttgcattgtagaaagattccttggactggggtgtgaagatggaggggacaagactgagaggaggaaaaccaattaagaggctgctactggattccaggcaatgtcattcctctagaggggtcatcctgattaccaaatgaaatacatactacatagcctcagaaaaggaccagagccctccccaagctaccttccacattccttcccagttttatcttttctaataggaagtatataccctagccaagcttagctacctcctggtcccaatacaaagctccccctttaccatttctcacgcctgaccacttctgacctaagcatagtacttagcttgttacacaagcatttatttacttatcactgaagctgaatctgtggcctctagtgactgcagtattcatttggtctttccatattttgtatagcatttgtgtggtcttcaagctaagaatggttttgacatttgtaaagtgttctattaaaaaataaaaaacaacggggaattccgtgatagtccagtggctaggactctgtgatttcactgctgaaggccagggttaagtccctggttggggaactaagatcctgcaagcttcgaggagtggccaaacaacaactagagaccctatgtggtccataaaacatagaatatttagtatctaacctttcacagaaaatgtttgctgatcctatctagaatgtgagactcacaaggggctgttaagcaagcatgaaaaatctcgcatgacacaaagatcccatgtgctgcaactaagacctgacacaaataaacaaataaatatttaaaaagtaatactgagaattcctgcactgaagtgaaaggagagttgggaaatgtgagttagaaaagaagtgactggagtttgggggagattaactgagacccaatgtgcatcacttcctctgaacacctgataatgcaggaattatcaccagcacagcaaccagcagttctaatatactagccactgcaaacaggcaggaaggagaagtcaccaggtaccatctctagactaatttaggttatagtgaattccaaggtttaatttttttaagtttcctttgttgtataagcaactcttaaggaataaactgaaaatacagtttcttttatagttacagaatctataaaactagactgagcctgggaagaatgaagtctcagtgaaattaatcttatttgtgtattaggagagggtaagaaccaatatttcttaaaccaatcctgtaagagactgtatattctaaatataatatacatccacaatacctagatgtattacgatccttggggtcagattttctttttttttaaattcaggattttgtggattttagaaaaacagtatcttctgtataccatattaaaccacatatacggggtctagaagcacccattacaaatatattaaaggtgtgaatatacaaaggataaacaaagactgagaattgatttgcatcagttcaggacagattttgttgccaaatgagttagcaaagggaaaaaaaaaaaagttttcagagttgggggactttgccatttcaggtaatgggttgggaacctatacaaagccttggtgctattactcctcagcaggggacacacactccatctgctaatacaggatcataacgctgacagcagtgacctgcgtaattgcttttcttaacagtaacctgtccttccactccgtagtagtgaagaatgttctctgatcagtggtgtcactgatggcaattcttcgtcttaaactcatcatctgctttaagttactgcttaggacttaagatgagtttctcttcagtatgtggatataaagaatccagaaaggggagtgaggtttcatggatatacctgccatttaagagactgtgtgcaccctcagctcacctgggcctctgctttctcatctgtgaaatgagaggagagaactatacaatccagtacacattacaaggcacagagtacaacttgaatacagatttgtttaatggatgaaagaatggaaagacctattttaacattctatgaatccataatttctgattcccgcttcctgaactttggggaggttaagtagtcgcacaaagaaggattttgtaaaggccacttgtgtacccttaagagctgaggcatttataaatgtattagtgtgactgaatctgattaaagtctgaaaaagagggcatgaaaagtcatggctaaatgtgagtggtttatacacctcaggagtgttgatctgtgtttgtgcgtgtgtgtgtgcacgcacttgagtactaatgcgtaagggttgattgaggggctatgggagacagcagtgtccagagcacctctgtaaggtagagagatggtgtatcagtattcagtgggcactgagtgtacaccacagacatccccttagctatgacactggggataagctgccaccttcatcctttaggtcaaggccttggtccccaaaggaaaggaaagagttgtaatgtcccagtgatcggggatggctaaccacctattgggacagaggtatagtgaaagatgagaaatgaagaagaggtgaaggcagcagaatcttcttgaagactgcaaacaatattagctgctgacctaactaggtgtttatgagctgaagtcctgacagcctgctctgggctgtgctggtggcacctgggaggggagccaggattttttttttagatgcttcctgcatggtttgtcttctcagtcattgtccataggactctgagaagctgtaggaacatgcaggtgcagatgcaatgcctggcttcacctccaacattgtggaaagggattgcacatcacgggacagagccctatgctcccgtacaccacttagagcctggggagagtgacctcctggggtatccacactggatgtatttgaatttttttataagcatgttatcactttgtaataagaaacactttgatgctttcaagcatgttatcactttgtaataagaaacactttgatgctttcacactgtggtgttggagaaggctgttgagagtcccgtggacagcaaggagatcaaaccagttaatcctaaatgaaatcaatcctgaatattcattggaaggactgatgctgaagctccaataatttggccacctgatgcaaacaaccgattcactggaaaagaccctgatgttgggaaagactgaaggcaaaaggaaaagggggtgacagaggatgagatggttggatggcatcatcaactcaatggacatgaatttgagcaaactttgggagatggtgaaggacagggaagcttggcgtgctgcagcccatggttgcaaagaattgaacacaattgagtgactgaacaacaacaacaagaaacaataaaggaggatagaaataaaatattagaagctgtttgacacaacaccaaaggattttaagaagctggacagagagttatatttgttatgtgatagtgagcctggggaattttcaagaccctcctccccttttgtaccttaaattcagcatgcgatttgctctcagtacctactgtggctgtcagtaaaatgtggggctttctcatggcatatcctcctattacctggggctcttgctctgccctggaatgttctcaaagcctgttactcttctggctcatagccacagtttctgatgtgccaaaagctgggagaagcaacacttaatttttgttgtggtttagtttctcagccaaactagctgtaccaaatactgagggtctggaccagaggagtaatatctctcattcatagttacctagattcctcacaccagatgttcagcagctgcagaaggatcccgctgccttacacatgtttcatccacctgggcagttggtgatatgcctggctgggtattacatgggaggctccaatggggctactgacccattccttaatgttgacccaggcttattagtgatgaaaatttctggggtagcaggagagtgacaatatgctttacctacttagttaacacgaagaacagccaatcaagcaacaaatactttttgaatgccatgggactcgatatgaatccctgtcacttctctccagggaagttaagtagtttctcctccctagacacactgtattgtaataatttgtttatctgtctgtctcttctaggctgaagactcattaagggcagagcctttgccttactcatctccatgcccattgcttccctactacccctagccctaatgcctaagctcagcacaaaataagccctcaatgaatatttctctcaattgagtcaatttactatatgctcaatataaatgaatatgggaattccctgtcagttcagtggttaagactcagtgctttcactgccataggcctgggttcgatccctggtaaggggaactaggatcctgaaagcttgcatggtgcagccaaaaaaaagatgaataaagggtccctagaaaaacaagtccctgactttagatggcaaacaaacaaataactaacaaaaaaaggaggagagaagtgctagagttgaggtacaagtgaaacaaatgcctcaggtaggcagaaaaaagagtgtggttaaactgctcagggtcttgagtgatttcaaggattattgttggcttctgctttcctcagcctccttccaattttgggctgtagctcctggagtgctcagacattctgtgctgctcttgccagttcttccctctttctcatggttctatttagtaaacagcctctgctgtcctttccctttggcatctccttgaatttcctgccctagagggaggcttccttttaaagccgtcaggccactggtagccaaatgtgcactgccaaagccaattactgagatttccatcttattttaatcaattatttggctagagctttaaaaaaaaaatccttattagagtacagttgctttacaatgttgtgttatttaggttggtgcaaagtaaccgcagttttgcattgtcaaactgtgctgttttaatattggaatacattcttaaataaatgtgatcatgttacatatcattttaatgcacacttcttgctttttttttagctaatgacttattacttgctgtttattttatttttattttagactagggaaatgatgtctagataaaaagtaagttcaagcaatgttcttattcgagttcaaaatggtgcgtaaagcagcagagacaacttgcaacatcaacagggcttttggcacaggaaccgttggcgaatgtacagtgcagtggtggttcaagaagttttgcaaaggagacaaaagccttgaagatgaggagtgcagtggctggccatcagaagttgacaacgacaagtgagagccatcattgaagctgatcctcttactacaggagaagttgctgaagaactcaacatcaactgttttacggtcgttcagaatttgaagcaaattggaaatgtgaaaaagcgctataagtgggtgtctcatgaactgaccgaaaattttaaaaatcgtcattttgaagtgtcatcttctcttattttatgcaacaataatgaaccatttattgattgggttgtgctgtgtgacaaaaagtggatttgacatgacaactggcaacgaccagttcagtggttggactgaggagaagctccaaagcacttcccaaagccaagcttgcaccaaaaaaaggtcatggccactgcttggagatctgctgcctatccgatccactacagctttctgaatcccagcaaagtcattacatctgagaaatatactcagccaatcgatgagacgtatggaaaactgcaatgcctgcagtcagcatgatacagaaagggcccaattcttctccaccacaatgccctaccacacattgtacaaccaatgcttcaaaagttgaacgaattttggtttcttccaggtttaggcctagtagtgggattgcagggtcatatggtggttttatccctagctttttaaaggaaactcaatccaggtctctataacaacctagaggggtgggatggggaggaaggcgggagggaggttcaaaaaggagggaacatatgtataccaatggctgattcatgttaacatttggtagaaaccaacacaattctgtaaagcaattatccttcaattaaaaaataaataaatattaaaaaaaaagaaaacgttgaatacattgggctacaagttttgcctcatccgccatattcacctgacctcttgccaactatcacttcttcaagtatctggacaactttttgcagggaaaaggcttctacaacaagcaggaagcagaaaatgctttctaagaatttgtcgaaccccaacggttagattttttatggtacaagaataaactttctcactgacaaaaactgtgttacttgtaatcatcctgattttgattaataaagatatagttataatgatttaaaattaatggtccaaaattgaaattgctttctcaccaacataaatggtttctactgtacagcaaatggaagcagccctacatatacatatatcccctcttttttttatttccttcctactcaggtcatcacagagcactcagtagggttctctgagttatacagtaggttctcattagttatctattttatacatagtcaaaatatatatcatatatatcaatcccaatctcccagttcatcctactcccccttcctccccttgttgtacatgggtttgttctccatgtctgtgcctctatttctgttttgcaaataagatcatctataccatttttctagattccacatatatgcattaatatgtgatgtttggttttctctttctgacttacttcacgctatacgacagtctctaggtttatccatgtctctacaaatgacccaattttgttcctttttaagggctgagtaatattccattgtatatatgtcctgcatctactttatccattcctctgctgatggacatttaggttgcttagagcttttcttaagaagccaaatcacatagtgagaagatcattaggtcctgcacatccaaactaggttggtggcctggggttgtgggaagtagtcagtgatctgagtcaggagtacaggtgccaagttcctgatcctcttccaagggatagttctaggcatttcattacaatctcataacaaaatggggagaccattttctttctcatttctatctcatgaggtataagttaccagttcgctgcctaatttgtggggttctgtgcaaaatgaaaatgtgaaaccacttgctaaaaagttaagaatttcaaggaacaccttaaactaagaaagcatgaggccctctaagcataaggccctatgcaactgctcacatgaatactcatgaagccatttctggttataagaatgagaaagctgatactactagtgtgacatggtggctataaagaagttcctgagaaaaaaataaagtttgtggattaggggaaacattaaattacactcaatagtttcagcaataagttatataaggataagattgcttctagacattccctgcagctgtctgtgctccaggcatgagacatcttaatggagcagaggccaaaaatggacctaggttctaggcccagccctgccaggaattcactgtgggacttctggaaagttactttctctctatgggcactttttcttcacctgtacaaaaaaggatttgaattagatggtcaggtctcttctaactctaactgtaagcatctatggaggaggccccttttgtcttgtcactttagcaaagctatactgtaactaaccttaagccaggcaccttcaccaccatgctctactcatcacctgcccaagcacacttttcacatcttttgatcacataatatcttgcctaatctattggttctttctgtagatcaaaacactagaaatgaagaataagtaattaacagatgaccagatctctttcctagtcttcccttcagtaatctcacaaacaaattatatgaacaagatattatctaaagaaatatcacaagtagtcaacaagcctgcacacaggtaatatggcaataagtgtggtcccctatctcaatgattaacagataatgcccccttttcccttaaaaaactaccatggcctagcagaatcttcagagttggtttttgaggacatgagtccaccttctccctagaaagctggctttctgattaaaagcaacattttctatttctaccaacacttgcctctcaaatattaatttttgagcaacaagcaaccagacctgagttcagtaacataacctgctgtgattccatatgagcagcatccccttcagagaggctgcaacactctgttgaatattccttttgatggtaagaatttgccctctgaaaataaatctgattacaggaagcagacaatagccaagtctagtaaggatagtaatatatggcctaaatcaggagaatttataattaaaaaacaattttcattttaagctgacacattggaaggactgatgctgaagctgaaactccaatactttggccacttgatgtgaagaactgactcattggaaaagaccctgatgctaggaaaggttgaaggcaggagaaggggacgacagaggatgagatggttcaatggcatcactgatttaatggacatgagtttgaggcctggcgtgcagcagtccatggggttgcaaagagtcagacacaactgagcaactgaactgaagttgacacaaccagaattaagatagcctgttacgtgtttttactcaaaattgtaattctgagaggccataaattcattctaatgctgcaagttgcttaaaatatctttagaattctagacattctaaaggcaatttaaaagttacacaagaaaaagcaccatataatttaataatcacaacttttatcttggaatggaaacctgtttcaaataaggaccagatatgcaccccaaaaataatcaagatccttaaagaagtctccttttaaattggtcttctattttgaaaaacatatttagaagagtgtataaaatattaaacttactaggttttagaattaatgagaagagggaaattccctggtggcccagtggctaggactctgcgctatcactgatgaatgcaagtgttcaatccctggttggggaactaaaatcccacaagctgcgtggcatggtggaaaaaaaaaaaaaaagaattaatgagaagaaaattaaacaggcagggctttccaggtggcgctagtggtaaagaaccccaggagactcagcagacttgggtttgatccctgggttgggaagatcccctggaagaagacatggcaacccactccagtattcttgcctggagaatcccatggacagacaaacctggcaggctgcagtccatagggttgaaaagagtcagacacgactgaagtgacttagcatgcagcacacacaaaagagtcagaaaaggaaagttcagaagagaaagttaagtagggaggaaaagttgaagaaatataaaaactatggggattggaacaagagggtaagtgaaactctaactttatctgtaattttttttggaaggatggagtcctcaccacttgacctccagggagttccctctgtaatttgttttaaataaaaaagacttgaagcaaatatagtaataaatatggatgactctgggtggagggtacatgaaattttccatgtttaaaaatattctcacaatactgaaaaaaaaaaaaaggaagagataaattgtactgtggtctggtctctctctgtatctggtagatcacagccctttgagacgctgattagattcagagctcttaggtcttaaactttctagagagtagggcaattatttataaccaagccgagatgttgattttgtttctctctgaatgggctgtttctctttaaaaagaataaagcatggctcatccaactcacaagaccagggttgtgacttagtgttgtctatccctaagaggactccaacttgcccaggtcgggagagaagagaaggaaggaaaagttagcaccatcagcatcaatgagaatcagtcattgtcagatatgggtttatgcttgacttccagcttttctctctacaaccttgggtgaaaaatagggagcaagttatgggcagagttgtggacttgtaccttctaatctgaaaacaagggcttcattccccttgtttattttatgctatttctttcatttttggctatgccacatggcttgtgggatttttagtttcctgaccaaggattgaacccaagccctcgggactgacagcagtttcctaaccactgaattgccagggaattcccctattcaccttgtttagaatgtcatggccattcgtcatctccttctccaaatcctatacttcccttcggaagcctgtttaagtcttagcctcctccaggcccgttgcactagcctgtttctgggttcttgccttcagccaagcaagatggcgccctctacttggggactgcctggattgtcctcttttaagatttctatggaaagccagtcccaccctatgttgctctgaatccctctacctgctgatccaggcctcagggtccacaatcaatggtgtctccagttaatgttttccttcaaacaacctctgtcagctagtctgaattctgtgtgaaaacagagagggataattcacaaaacagaatttaagccacattcttcctcaaaatatcttcccttaactagtcagattccatagcatgtcttatgggctataaggatcaagtgcaaacgctctcggtcatggttaagttggtagcaactaatactactggattagttttctactttcctatctaagggcagacctctgaagaaaggaaagaagaagcaaagaaagaagggtttgagagagttttggggcactgtgttaggagggtagattctgctgagggtgagtgtgagaaagaaacttatgaaaagcacctggagagccttggtcacaaatttggctcacttctcaagattgcctcttgtgagcagttgaagaaaggtactttagggactgagccccaccttctgagggatccttttaatctgcctcatctagacacgcggggcagacaaaatattagaaagacaaggccaactgagcatgaggaattcactaatttctgaagttgtttgctcttgttctctgtctttggttaactgagttaccaaagctagggtagctttgattagcaattcagcagagattctgaacctctgggactgttgcctggataactgtaaatgtctcttaattaacatcctgtcttcattcttgtcctgtttcatccatttccaaaatagtagagatttttttttttgaggggtagggagagggggaattaaaatcacatatcatcccctgcttaaagactttaatagtttcccactgctctttaaataaaatcacaaattcttgtaaggccctgttgttactcactctgacctcatctgatagactctcccactcaattactaggttttagacatattgtgctccttctaccttggccctaatgttcattccttggtcttgaacttgattcttttagttcttcacctggctggattattggcaatctttggatctctgtacaaatattgtttgtacaaatggtggtcctcctttgaccactctatctaaaaagtgtccttccttggtatttatctgtctcatcatcctatttctttcatagcacttacccacaatgtaacaattaataattgttaataataatatttattttgtatgggctttccttttcttgtagaatttaaactccctgagggcagggaccttgctatcatattcgttttgttgctcccactacccagcagtagttggcacaaagcaaggcactcaaaaaatatttggtaaatgaatgaagagaaaagaaaaacagcaacagaaaatcctcagatttgttggtccctttgggccaacaagactggagagatgtcagatttcatatcatagcagatttcagtcagatggtggtttcattttttttcccttggcctttgttctgtcatactggggcttagacaactcttaagttgcagcagcatcccttatctgagtgcgaagatatattcaggactatggctttccttagggctcccctggtggtggctcagacagtaaagaatctgcctgcaatgcaggaaacctggattcaacccctgggttgagaagaccccctggagaagggaatggctacccactccagtattcttgcctggagaattccatagacagaggagcctggcaggctaccaaatatagggtcacaaagagtcggacgtgactgagagactaacactaacacactatggcttttcttaatatctttgatcttgcatttaatcaagaaagataaaagagggatttcctggctgtccggtggtaaagaatccacctgccaaagcaggggacactggttccatccctggtctggcatgatcccatgtgccgcggaacaactaaacctgtgtgccacaacaaaggaagccatcacaataagaagctgtgcaccacaaccagagaaagcccgtacacagcaaccaagacccagcactgccaaaagtaaaataaataaataaaaaatttaaaaagaaaggtaaaagaaataatctaatttgtggataaaaatgactaagtgaaaagtgaagtcactcagttgtgtccgactctttgtgaccccatggactgtggcccactaggctcttcagtccatggaattttccaggcaagagtactaagggaacctgaaatgaggatataagaaccacagagctttagcactgaaggagatcttaggaatcattttgtccaagaaacttaaacctggctgtgcattagggctgtcaggagaacatttgctcctttgctaacagtactttgttaagatattatttctatacaataaaatgcaccaattttatgtatcaaggttgatgaattctaactttatacacttgtgtaaccaccactcagatcaaggcatagaacatttcttccattcctgaaagttccattgtgcctctttccaggcaatatccattttcacccatcaggggtaatgtctattctgactcctaccaccatagattgattttgctggtttttgtactcacataaatggaatcacagggggtcccaggtggctcagtggtaaagaatacacctgccaagcaggagatgcaggtttgatccctgggttgggaaaatcacctggaataggaaatggcaacccacaccaatattcttgcctagagaattccacggaggaggctggtgggctacagtccacagggtcacaaaagagtaggacatgattgaatgactgagcacacaaatggaatcatactgaatgatgattcagcttttgtatctgacttcttttgctcaatataatatttttgaggcttcattcatttttttgtatgtttaagtagtttgttctttttttcaatagctgattagtattccactctaaatataccacatttgttcatccattttctcgtgtaacttttacaaaatgtaaacgccaaagcctgtcctcggcccactgaatctaaacttccaggaatggagtttgggagacatactttcaataagtttccaggcaattgtgatgtacagccatgtgtgattctgtccattcactctggttctacagataaggaaactgacagcaggaaagagatttcccaaacagacacttgaatcagctgagtcaagcttagaacattttctactgtgctacccttttccttggaagataagtcaagttgctaattactgacgagggcagagacgtgagtcataagaccttccatttatcaagtacctgttatacattaggctctgctctaggtacatgagtccaactctttgtgaccctatggactatagcccgccaggctcctctgtccatgggattctccaggcaagaatactggagtgggttgccatttccttctccagaggaatcttcctgaaccaaggacagaacttgagtctcttatctctcctgcattggtaggcaggtgctttaccactagcgccacctggaaagcttctataggcacattatgtacatttaatcctcttaacaatttgtgtatcacagctgaggacactgaaacccagagcagcccaagggacagaggtagcatgtgatagagagaggagttgatcccaagccttcctaactccagagtcacacaagaaagttggtactttagcctgaagtgaaaagaaggaaaattacaaactccttggtttggtggtcttccattctggcctagtccagcttgctacagtagaaataaaaacataacagtgttcaccccatttctcaaactggttttacaattcctttagttctgtacacagtgctctatcagttaaagtggttgactgtccgattgactaaaaatgctgccgctaaagggagggagatgtatttgcttaatcactagctcttcctcctctattgtgcctgggggtggggactgcaaatgctgccagcaggtctgtcagagatgttctccacaaatagaaagctagttccccttgactgtttcatcagggagtaaattgaccctagcaatcagagacaagaatgagtgagaaatacatgtgctagttgagatgctgaaccttgagtcctgagagactccaggactccagaaactggagtttttcaacaacacactgtgtttttcaataatgaggaaatctggaaagtataagggatgactggctgaggaaagtggagacctggcttttgtagctgatatggttgggggaagtaggatgagaatagaggggaggaagagaaaaaagcttgtggatacttacaaagactctctccctgaccaaactttagttaggtttctctgagccctctttttaactagaccttgactttggccctccattctttggcttgcatagctcagattttgcaagaatcctgtcaatttagtgagaacatccctacccttgatatatcatcattcaatatctaatcaagtttctcatcccccacctttgatgtataagcctgcctttagcaagaatcctgttaggttaggttagcaagaatccccttatccttgatgtctcctcttagtaattttccatcctctaatcctcttaatgtcctcactggctaaaaattcccaactgtccttgtttgtaacctgagttgagcctgatcttcctctcctattgcaacatccctatggcaacagtcttgagtaaagtcttctttaccattttaacccgtattggaataaacgataccaaaacgatttgatctcttgggctatatctatacacatagactgatttgacaattgtgactgaattgactagtttaattcttatgccttacaggtgacaaactgaacaatattctaataatattctagtattagaataataacattctaatattattatatataatatataataatattagaacattatatattattatattataataaatatatagtaatattagaacattattattctaatactagaatattattagaatattgttcagtttgtcagtgaagatcatggcatctggtcccatcacttcatgggaaatagatggggaaacagtgggaacagtgtcagactttattttggggggctccaaaatcactgcagatggtgactgcagccatgaaaataaaagatgtgtactccttagaaggaaagttgtgatcaacttaggtagcatattcaaaagcagagacattactttgccaacaaaggtctaactagtcaaggctatggtttttcctgtggtcatgtatggatgtgagagttgtactgtgaagaaagctgagtgccaaagcattgatgcttttgaactctggtgttggagaagactcttgagagtcccttggattgcaaggagatccaaccagtcccttctaaaggagatcagtcctgggtgttctttcaaaggaatgatgctaaagctgaaactccagtactttggccacctcatgcaaagagttgattcattggaaaagaccctgacactgggagggattgggggcaggaggagaaggggacgacagagtagtttagcagacagaggaggagatggctggatggcatcaccaactcaacggacatgagtttgagtgaactccgggagttggtgatggacagggaggcctggcgtgctgcaattcacggggttgcaaagagtcggacatgactgagcaactgaactgaactgaactgaactgattttatattattattagagaatattctaataatattcttgtctgggtttcatgtggacagcctgcttcaggactcttcttctgagaccaggaaccatgtggtaggcccaggctctgcccaagaggctctgcattagaattctaagaaggcttcatgctgtgctcctcctcaagaagcaaaaggacataaagcatcctggaagctgcatgtcaatgtgaagtctgtctgctgttctactgaaacaggattcaagagtcccaattcccagatacacattcccacactgtataaggaatgcaatgctggtaggagctgctaaaatgattaatctcctgacatcattccctttgacttgatttagttcttatcactcaacaaagatcactgtggggactttactgattatggttttactctccagaaactatttctctcttttctctggcccagtaatcatactgtcttctagtgttctgaattcctttcacttgggtattctttacttgttgagtgtggcctgaagttgggtggatggtcttctatagctctcaacaaattttcagcagaaggaagggaagaggctttgatgtcagagaaattttctgcagaaaaggatcaaggcagaccaaagggaatacagctgagcaaatcttaagaccatgtgtgaattagagaaactttgtgtttagacaaagaagaaaaggttttgagacagacatctgtgaaattgtgttttagaatgggtcgagatctctcactctcacaaaagcccctaaaatagccaaagaaaatccaaagtgactccaatgttccatctctgaagcctcctggagcctctccaatgaacatggcagaacaaaggtccagtgttgctgaaacagaacaaacgcaccacaattgaaaatattaatccaagctttcctctaaggggcattaaaatgtgctgaaacgggcatccaccctgaaaagccaaacccttggaaaggaaaaggaagatttccaacagatggaagtttggttgtctggtttggctctaataaacatgaaatgaatccattcttcacatgaagactgatctgaaatcccaaattctactctctgaaagccattagaaatctgatactactggtaacttcctgaagacattaaagaagcgctaaaatgtgattctggcatcagggctgagattttaaagtatgtctttctaagtaattttttttcttttgctgctagaaagtggaaaaagcagggtatagagtaataagaagctactagcccacaaaaggtagactgctttctttgtgctaaactactctgatccacaaaagtgaaaaaaaataaatctgtttagctttcctgaaaatgaagaaatgaagatgacccacaaaattctttaaactttcaaaagtaacagtagctttatcacccaccctcctccctgaaagcatatttaaattgataatgcttcccctcaaaaagtggaggccaaaggaatctggttctcaccttgtaacagagcaggctggggctagctcaaccctcatttcaaggacaagaacaagaaaacaaacaaccctactgcaaaaattattttaaatttcactccatctcacaggcaggaagagtctcactgatccacaacgcaaagaaaaaaatgtttcatcatcagaaaagcagcagtaaatggaacagcagagcaggtttgttttttttttttttcaaaagtagaaaaagtaaagggcagtgcttatggctagaggggctctctagccattcaaaacttaaacacagaggaggagataggatctctgtaggcagcagaagaaaagaaaatttttttttcctacttacagtgtcttttacctctaagggaagccagagctgagcgtcttccctgttcttatgcagcagaggcaagatgtgttgctgtgagatttttaaaagaccccaggaactcccagtagctggcttcctcattgcatctctgccttcagccaagtgaagactgccttcatactcattctgatggccgcaagccttgtggtctgttctctccagtctttgggattagaattggtgttgacactgagggtgtaaagggttggaaaggaagtggctgcaccgaggatacccatgggcaggatttaatgagactttaattcagaatcaaccccaggagagagaatgaaattttgccctaataagttaacctggaaaaacacatcctgccaaagaagggtttaatttagcttctctcagaaattctggatgggctaaggagcactcagtagagaagttaaactctaggtaggcatattgctgaggcctagcctgctttattcggagaaggcaatggcaccccactccagtactcttgcctggaaaatcccatgggcggaggagcctggtaggctgcagtccatggggtcttgaagagtcggacacgactaagcgacttcactttcacttttcactttcatgcactggagaaggaaatggcaacccactccagtgttcttgcctggagaatcccaggcatgggggagcctggtaggctgccgtctatggggtcgcacagagtcggacacgactgaagcaacttagcagcagcagcagcagcagcagcagcctgctttattagtaaagttttacttattttattttactttattttattagtaaaatctctttggtctcgtaatttttaaaacttctacataaatttcaacagttgaaattctgctgacatgataagtgattagtctgtggttttcctcttcttgctcacttgagctttattcgaacaaactagaatttacaaggtcacaatttatgacccctgggtgatgtgaagttttgaagttctgcagagaagagcagcttaatataaggccatgcagcaagtatttgttttgctggtgatggtggtgaaagaatgtgataggcagtgatgatccctagtccttcattgatttatccttatttatagggatcaacttctttttcgtggtttatggatacagggacaattggaaagagaagtgaatacaaagtcagaagaggtggattctgttcaggttttgttactttctttctgcgatcttgggtaagtcatagaaactgtctgaacctgctatctcatctgctccccaccgtgggccaaaaagatcaaatgaaaccatgtagatgccttgaaaactgtggggcattccacaaatgtgatggttttctaaattttcattcattgtatgacccaccaagtaagctcttcagataaatcaagagttcaaatacggaatcaggaggagacaacatcttgagtctgatggatactagatgatgggacttgagggctatggaagatagagctaaaggaaaaaaaataagaataaggagttaaaaaggagaaaagacataaaattcctagagaaaggcttgactctggtgctgattgggccttaagactttaaagtaaaagttaaagtagctcaatcatgttcaactctttgcaacgccatggactatcagttcagttcagttgctcagtcgtgtctgactctttgcaaccccatgaattgcagcacgccaggcctctctgtccatcaccatctcccggagttcactcagactcacatccatcgagtccgtgatgccatccagccatctcatcctgggtcgtccccttctcctcctgcccccaatctctcccagcatcagagtcttttccaatgagtcaactctttgcatgaggtgtccaaagtactggagcatcagctttagcatcattccttccaaagaaatcccaaggttgatctccttcagaatggactggttggatctccttgcagtccaagggactctcaagagtcttctccaacaccacggttcaaacgcatcaattcttcggcgctcagccttcttcacagtccaactctcacatccatacatgaccataggaaaaaccatagccttgactaaccatgaaattctccaagccagaatactggagtggatagctgttcccttctccaggggatcttctgaacccaggtctctcatattgcaggcggattctttaccagctgagccacaagagaagccctatgactctaaaatataatcctatttgaatatggagcaatggaatataagtgagcaatcaaaaatta

SEQ ID NO: 152 - DNA, 80549 bp, Hippotragus leucophaeus
  source 1..80549: mol_type = genomic DNA
tgtaataaataaggcacgtctatttttaaacaatttctactttttccttcaaaaactagacgttttatacagtgctttgaaagccactgctccctaatctggcaggcagggagaagggctcaagaatctcaaaattatgcactcaaattttacaatgtttaattatcttttcttgaacttttagtcaaataaaaaattatttatgatttcagcagcaattcagcatcttcagctgtaggacttgtaaacctcaatgctctaccttatctgttgctagtgaaaacaaaaaatactggaatttcattttcaataaagctaggttctgagctgatgccctgaaaaagatatttttgtcatcagacaaatgcaattcaaataggttccctaaaatgagagcatgagaccaacataaagccttgcaatattttaaaaagctaaggtgatcatgaatactgtgtcagtgcaggacaacatcatctagcagcattctctgtggcctgttataacgcactgtcgtcatcttccctgtagtctccgaccaggagtgaatgcttgtcaggttcactggtaccaacgctgtttagtgatcgtttatcagacagtagtgaatttatggaggctctactgtaattaacaattcggtccagcaaacccagtttaggagaatttcttgaggtatcctctattccaacatgaacacttatttctgaaggacttttctgtcccatttggtttcgggcatgtagttcataattctcataagttggtttcctgtaactggaaagatgcaaaagtatactagtttgaaataatcaaatgtgaaccaggcacttgttacattcaaaaatgaagagatttggacagtatgaaatgtataaaggtggtccctgctaggaaattagctcaaaaggagttgtgtgaggtcacatgatcagaaatcctacttctcagagccagtgtactagattttacacccctcagtgcttgtggttgctctgtatagactacataaggtgataattacataaagttaatatttatcattaaaaacagtttgggcttatcattaatcaatacaagaataaaacctagcaaggctgactgtggatgataaaaggaatacaaaagagaagtgtgagcaagccattatacttacagtttaaggaagagtgaagaaagtactactgaaacagatgaagcagccattgcagcagatcccatccagggctgcaaaaccaaaccaatgggcataaaaactcctaggaaataagtttggattaattagagcagacagtactaaacacactaccaatgtgttcctaatacatatatacaaatcatttccttcctcaatatttaagcaacaatttatcctcctgttggtacagatttatgtcattgccaatttttcactaacacagtgttgctgtgaacattcttgtacatgtctccttgtgtatgtttgagaacctccctagggtacatacagaggtgaaacagctggattataacatgggcacaccttcaactttaggtagatgcttctcagttgttctccaaagtggctataccagatcacaaaccccccaataatgtattagagttcatattctacaaacttatctacacttggttttgacagacattttaaaacttgttcaaatgatagagatgagatagacttactgcacttgtagttttttatgtgctaatctgtatttttatactttttctacagtgaccatatattacttgtataatttttcaaaaataacttgctctatgaattaatctccctggactttgattgttcttttactttgtcctctctgtatctgtgtttccctgttgataaccagctttgtaattgttctcatgttcttcatgttcatctttggctctctaaccagagagaacaaaaagaaagtgataattatttttctttcttttttaaaaaattatttagtttttatttatttttggctgtgctgggtcttcattgttctacatgggctttctctagttgcaacaaccagggcctactcttcactgcagtgcgcaggcttctcactgtgatggtttcagtaatcgagaagcatgggctccagcagttgtgtctcacaggcttagttgctccatggcatttgggatcttcccagaccagggaagattgaacccgtgtcccctgaattggcagtaggattcttaatcactggaccagcagggaagtctgataactatttttctcatgttattgttaacacttaccaagcccctaggtaacagggatgatcagatgcttattaaataattgtaacctgctttttggggggtcatattctttgttcaatctctctctctctctctctctctctctctctcacacacacacacacacacacacacacacacacctggctccccaacctaaaaaaaatgttggtattttaaaacattaagaacattctctgtatgttatgattacaacaatgaaacaagataaaaactgatacagagtaaaaaagatcagaaagacacgtacaaactaaaataccaacagtagttatatttgggtagtgagattaaaggtaaatttattctcttcagcaaaaataataaatgaccaagtaaataagtacatatggagaaagagatgaagcaatgtggcaagatatattaactgtgaatttaggtgaagggtatacagattttattatatcattttttcccttacttttgtaggtttgaaaatttcaaaatacaaagttggaggggaaaaacggtaaaataaaataaacctgtctgaatgattatacattttaaggcataatgaaaatgctgaaaatttaaattactgattttccctgatagctcagttggtaaagaatctgcctgcaatgcaggagactctggttcaattccttggttgggaagatccactggagaagggataggctacccactccagtattcttgggcttctcttgtgactcagctggtaaagaatccacctgcaatgcaggagaactgggtttgatccctgggttgggaagatcccctggagaaaggaaaggctacccactgcagtattctggcctggagaattccatggactgtatagtctatggggtcgcaaagagtcggacatgactgagtgactttcactttcactttaatattatccctcaccataccagcaggctacatacaaaactgggctcaaaactagtaagaagaagactaaaacttccaatatggtaggcatctaacgacttcaggaaaaaaaacaatacaagttaaccatcacataccagcagctataggaattccaatcagattataaattagagcaaagacaaaatttatccgaatcctcttgactgtcttccttgataaatcaatacttgccactacatccagaagatcattctgagaacagaaatatttatgatattaacaacagattctaacttaactagtaacttgtatttgatgccatgtatgacaaagatgatatgcatcttaaggaaatatgtgaattaactcaaatctcagatactgctaaaaatttgagtcagtcttggaagaggtttttcagaatttttttctcagggttctgaaaacacttttagggttgtatgctggtacagggactaaaccccactaaaataacttcagtaagtacttgctgaagataattgtgttctatgtatattcctaaatttaattcttcatttagaagcttgtcattctcatttgctcccctgaattgagaaagtctgaaagtaattactaagacttctcatactcccatcctgaattctccctttctcaaaggtcaggaggatggaaattagaaggacagagtcatatgttcaatatacaacattatctctgaccatgcagagcagtctcacactcctcaaaggtcaggccaccagacttacccttatcaaaaccacatcagctgcttcaatggctacgtctgtgcctgtgccaatagcaattccaacattagccatggccagagctggggagtcattgattccgtctcctaccattgctacccgtttcccctcctcttgaagttgcttcaccttagcaaccttgtgggaaggtagaacttcagcaaacactttagtaatgccaacctacatgaggaaaaacaaactctactcatttcaagaaatattactgagtatgtgaaatatagggcttctctggtggttcagtggtaaagaatctgtctgccaatgcaggagatgcaggttcgacccctggtcttgcttgggaaatttcatggacagagaagcctggtgggctacagtccatggggtcacaaagagtcagacatgactgagcaactaaataacaaaaacaacaaagcctaaaatctaactgttatattttatataaaatatttatcattttacatagtgattttatatacataacaatgatggttcatcattttatatgatgaggagccttcattttccacctaccagatgtccaaattttaaaatattagtaatatctagggatagtaagactacagggaaatgagctctcttagatactgttggtgggtgtgtaaatgtgtactgtcattctggagggcatgtaccagcatctatcaaagtgggcatgtcatttggttaaggaattccactcctagctatattttggacattcttatacatgtataaaaagatgtatgcccaaggatgtatattactgccttagttgtaacaacaaaattttcaaaagcacgtaaattattattttttattagaggaatggttaagccaattatgatacattcacaccatggaattcaatgcaatgatgtggaaagaatgaagtaactttatatgttcagacatggacaaagctccatggacatggacaaggcattcatattattatctgaaagaaagtaaattgctaaacaatttgtacaaaaatgatccaatttatattgaaaataccagaactatacatctgtacatgaacaataagtatatgagaaagtataaggggagagggctggacagggagcttgggaaaaggttaacaaactttttactttatatccttctgtatctttttatacaagacagtatttatatattacttctgttagtcaatagaagaggggagaaggcattccaaagtagaaaagactaacatgagaaaagttttaaagggaaagcaaaagtggaggatcagtagcaggaaaatgctacggaagagatggttcgttctatcagtggtatccaggatggactagagagggccatgcgtggagctactgctgtactttaggcatgagaggatgagagcctagcttaggctggcagcactggtagagactacgagcaacatttcaaaggaagcatcaacagaaactgtgtacaatgtcactaagcatctcatgaattaagcaaacagctttttacttataacagttccagaaaaaagcacaaagtccttcctgtgcagacactatgtcaattcttttttaaggaaccaggtatggctactcagggataatgaatataataggtagtaccaattctttagcacctgaaggcaagaaagaaaatgtacgtgaagagttagaagttaacacatactcccaccccaactactaagtaaacccattacctgagaagcaatagatctagctgttttactgttgtctccagtcatcagaaccacttctaagcccatagatttcagaatatggacagccagttctgcttcaggcttcactgtatcagcaatagctatcaaaccgcacagctcatctaatataggagcagcagaaaatagaatttggaatatggtgaaagcagaataatattctgacttaaaatttcagaaataaatgatttttgttaaacaaagttgttcagggcttagcttaactcgaaatactcccaagaccacacaactccacagtaagtctctattcttggttgtgaaaataccacaaaccccacagtaaccccacagtaagcctctattcttggctgtgaaaatctcagagtgaggtaggggttactaatgaaggtaataataggaaaatgaaaataaactttactggatatactaaaagacttacattcttcctttagagaagtactgccaagagctccaaacacttcagctaatttaaaggcaaatgaaactgaaacccaatactttcttcctttcaaaggtgaaggggtggatgaaaacaaaactggcattttatactgggggaaaaaatcactgcaagtagctattttatttcaaaaatgaaagtaaatgatattttctgcttttgtcctggacctaaaaagggcatagtaagatactgccttcatacttagcaaagattataaatgttaactaattaatctcacagctataaacttaccctaagaaataatttaataaaagccaggcaaatgcaagagaatttaaaattaatcagtaacaattatgtattgctgacattttttattttgcattcaggctgcttttgaataaccctcatagttcagatgtctctcaaaaatacacagaaaacaactgagatcacaacactgagtcacagcgtacttaaggaaaaccttaccatcaactgctaccagtacagcagtccgacctcttctctcatgttcagtcatggaatcatttacattgctattaatggcaagaccatttctaatcatccactcccggttgccaatgagaactttgtactgctgagcattaagagtatctgaaagaaagtacagaagaaacatttagtgaacttgtttaatatttataacaaccctttagggacactcttcctctctacgcttgcagttactacattggttttttggtagaacatagcctataatggtgatttccaaatgttcaaggaacacactctgctcttctatgcctctgggcctttgcacatgttgctacctccacctggaggtcctcacctctcccctccaaataccaaattgcatcatattccttaaaagctagttcaagcattacttttttggtgatgctttccattcaacatttccttatgatcttccatggcaactgaataaagttaaaaatatttagtgtacatcagtacaaccataatggttagataagaacacagaactacaatgatatctcactaagtttaagtgggtccttagtgctttctggtaattctactgtatttccctagtccattcattctccattccttctagatggctattttataccttttcttctcccattctcataccagatgatgatgtgcttcctacttcagaaagaaaataaaagcaatcagaaaagaactttcagaagctctcattgccatatatacccaactacctaagcctctgtacatactgatctagtttcttttctgttactataaacagccccaactcctatttaaggccaacttctccacttgcataaacagatccctctcctttgcctatttcagaacatctctccaacaattctctcctctctcttctgcatcatcatattttctacttctgctgcacacagtcctatttttaaaaaagaaaacaaaacagatctcatttatctctctagctactgccccatttctttgcttctgttcatagcaaaactcctacgaagtattgtctgtatcagcttcccattctcctgtgaacctgttccaatagaacttttgtctctctatgccaaagaattgtttatatggtacaccagtgatctttaataaatgtaaagggtaattcttagtcctcatcttacttgccctattagcatttaacacagtcgaccattctctccttgaaatactttcttcatttggcttctagagcaccacattcttatgagttacctcctaccacttctgttttctttactgatcattcttcatctccctgacctcttaatttgtagtgttgcagggcttaatccttaaacctcttccccaccaatctactctcatttcctgattttttgggggggctcacctcatggcttacagaatcttagttctctgaccagggatcgaacccaggcccatggcagtcaaagtgcctggtcctaatcactggcatgtgtgaatactcagttgcttcagtcatgtctgactctttaagaccccatgaactatagtccaccaggctcctccatccatgggattctccaggcaatactggagtgggttgccatgccctcctctaagagatcttcctgacccagggatcgaacccacatctcccacattgcaggtggattctttactgctgagccactgtggaagccccctaaccactggaccaccagggaattcccaactctttgaagattttatgcagtctcatcactttaaagaccacctatatcagcactgtccaacagaactttctgtgatgacagaaatattctacatctgctgtttaatacagtagacactaacaacatgaggctattgagcactgaaatgtgactagtatggctgaagggctaagttttaaactaaaatttaactaatttaaatagtcacatgaaactagtggctaccacactggatagcacagatctataaatggatgactcccaagtctacagacttgtatagccacctgcctccttgatagaacatttacacaacatctccacttgaacacctaacaggcagtcaaacttaacatgtcaaaaactgaactcctaatcacttttcctcaacattatctctcctgtgatctccatcttgtttgaatggtaaccccatccttctaaattggttaggctgcaaactttggcctaattcttgactcttgtttctgtcataccccatttccaatatgtgagatatatcagtcatctctcccttcaagatacatcctggggaagtccctggcagttcagtggttaggacttccattgcaaaggggcacaggtttgattcctggtggaggaactaagatcccacaagccacgtggcatgttcaaaaaaaaatagaagatacatccagaatttgaccacttcttacaacctctactgttattacattggtccaagccatcatcttttacctagattatggcaacagcccactaacttatccccttgcttctgtctttgttcctacccacagaaacagtgtatttttaccaaagaagcccaagtaatacttttaaaatattaagtcagattctgtcactcctatgctcaaaactctccaatggcttttcacctcatagtaaaaaccaaactccttacaaagttcccaatcatttactctgttccagccacagggttcctcaaactagtcaagcacactactgacttaaggcttctgtactcaatattcctcctaactggaatgcttttgtcacagatattcacataactttcttcctccctcgccttaggtttttgctcaaacagcactttctcaatgaggcctaccctgtttagcctatataaaatagcattccctccaataccacttgctcttcttcattttcttcatagcactatccatcagacagactctacttgcttatttgcacactgtctagcgttctttcaccaggaatgtaaactccatgagatagggtctttgtctattctgctcactgctgattctttagtatcttgaacagtgcttataaaacctgtcagatgaacgaaatcactatgtgtcagtgtgcttgatactatgaattcatagacaaataataaagaaatcacaacttagtagaatcaggcagataaagaaagaattatcatgcagtgtgccagactgcatgttatagttatgactaaaaaggaagagcaaatatctctgcctatgtatgtcagtcagtggaggcttcactaaagagagatgtgagctgagtcttcaaagatgagaaaatagtaaataaagtgatctaacaggcatgaaatgacacaatgtacagagaaactttaagtagttccataagaacgaaacacagggtgcatgggtgacagtggaaaaacacaagatgggtagatgggtggtgcagggaggcaggagacatatcatggggaatagatcttgaacaaaacacagagagactggactttgtcctgtcagagatggagcgcctataaagccaggatccttaacagatttccatggaggggcttagggatatatacaaatgtgcaaaacagaaattttctgagtagtgggaatagcttttatctcattcctccaaacgttcatgactcaaaaataggttataaaccactgcaataaaaggtattagtcagaaagtgatataatcaggtttgaatgttagcaaaattactcaagtacaaatgggtggggaggtgcaagtacacttaggtatgtatatcttggttttggtcagatggatagaccaacaagaaactcagtaaagtggcgttgctgcagatacagattttagagtggcggtggaaaccctacaggtggtagaataagcaataagcatgaatgagattatatagagagaatatgtaaaatcagcaaaagacaaaagaccaaaactctgaggacacccaacatttgagaggaggagaaaagagcaatcaggtgaagattaaaaagaacagccaaattggtgagaggagactctagagaaagcagggtcatggaatcaagggagaaaaaaaatttaggaaagaagaaatggtcaacattgtcaaatgccttagcgaagtcatgcggcaatgaagactgaaaactaaccactggagaggggatgaaacaaggtcattggtaaacttaaaatagtttcactagtatggatggggccgaagccagactgtgcagtgaattcagccagcttagactagtccttctagaagcttggatattaatgaaaagacagacagatgggacaaaaatctagatgggaatacagtgattttgatgggggaaatgtttctatgttgaggagaaggagctatgacaaagagttggaaaataaaagcagcaaggggatatactataacagggtgtgaggtccttgaggaatcaaaagagggtaaaatctggaccaaagatgaagggattcattaggtaagaaaaggcatacttttttctctgaaaacggaaacattctgggcaaaaaaagagaaaagaaacagaaagaacacatgtctgagaatcttaaatttctgtgcgaaaaataagccagacaatttgcttagagaactagggagaaggccataagagcttgtgaaagatagaaaaggtctggagcagctgtgatgagaaataaagacagctgaactaagacggaagatcagctagagctagggtttatcaccctccattgtaatcaaggagtgaagctgaaaaacattcttaagcaattcagtgaaataattagaaggcctgtggtgaaactgatttacaagaatgaaaccatgatgccaatctttgtttcttatgtaacagttcaatttataaggttagatacctgttaataactgtcccataagtggtactacaaaaaaaattagcttacttgagaactgagcatcaataatcatggaagacgaagttgatgactgttcattactctcatctatttgaaccagagatgcatttttaatattattttcctctatcttccagttattcttgtgtagcaagccttcaatattggtgactttacagttaatgccacagcctggcacaacctggaaatctatgcaggtacccaaggtttcagtgtccagctcctaacaaatagaaacagaaggatttcttctgctgttctaacaatccaagttcatcattagcaagatcaaagattactgctggttaattctaaacgtttagatacaatctacaggcctggttaattctaagtgtttagaataaaattgtcacttatcattgcctatttgacagtgggttttgataaggacaaaggaacagagcattttgagtataatgttcaaagttacaggagaacctcataatcctttaaaaaaatcccactccgtaagatttataccaaatttaggggaagaaaatgtggaaggtttatcaatattctctgtcctttccagtagagaattacaagttaaatatttaattctattgtcaagttagattttctatttagtacagggcaaagggtaacaaagaacagagcctttagttaccagagggcctctctagtatgattctgtgtccttagtaagccaaagaattctggtgaccatcactgtttcctggctctttatatctttgtcctctccattgtttgatttgggtgtatagaagccagatcagtaatagttaataggtaaaaaggaaagaacaaataaaaaatggcaacatcaatggtgaaactgccacattttaacagaaaaattatgtgagataatttacaaagaacttatacaaatcaataagaaaaggtaaacaatcttatgaaaaaaataggcaacacatacaagcaaacagggtatagaaagaaatgcaaataaccaatacgcatatggaaagatgctcaaccttattcacaattaagacaatgcaaagtaaacagtcaatgaataaatattttttacttactgaattggaaaaattaagtgttagtgagaatgtggggaaatgtcactcaacttctggtaaaagtataaactggtatacctttttgtgtgggtgttgataacatttgccatttaagtgttggtaacattcatcaaaatttaactatacctattctttgatccagcaattacattgataggcattaaacattagagataaacttgcaaaagctgacaaggatgttaactacaggttttaagagccaaaaagccaatcatacagtggaatataatataggcattaaaaacaatgaagcaaatctgtatgtcttgataaggaaaaaatcacttaatacaaatttttaaaaaacaccaaagactggtcattgtattatcacccttctatgtaaagtttaaaaataacaaatgttggtatatacactaaaaatggttaacagatgcacacttttgtaaatatactgaaaattattgacctgtacacgttccaagcgtgaactttagagtatgtgaattttatctcaataaagctgttgttcaaaaagcctggtaacaggttaatacttgttaaactttggagagaggaattatggaaaggggcagggaatgaggctttcctttttcattacgtaatgctgaactatctaaaatttcctcccataaatatgtattatttcttttttatttcttagttgactgaggttatctgtgctgtagggttacagttaattttcattttcatctttatacttttctgtatgaagaaattaagacatacaaaataaaattagaaaacacaagtttctctagtttcatacaaattatatatgtaaatcatgaataaacaagggaaaaattgtacctgcttgcagtatttggttatggctgctcccagagggtgttcactgttactttcagcagttcccacaatagccaggatcttattgcgtgacattctgttactttccactagaacctttacttgattcactactggggttccatgggtaatggttccagttttatcaaataccaccacctttacctgtaagaaaatcaaagcagaatgcactgtatgacttcattccagaaatgagaaaaaaggtttactgtgacaaacacattactattttgtttcttaatgagctgactttgatttaattggacttaaatggtctttgggagactaaaaagggagaataagggaagaaatatcgttagttacacgtaataaccctcccttgcaaatgttcaacgtgctgtgaacatgtgttaaatagctagaactacctgttaagagttgactgttaatcggtaacttaggcctctagtgcctctggggaaagaaaaagactttcaatactaatgaattttagatctgtaggggaaaaaaatctgggaagtaggtaaataattacaattgagtaattaatttgaagtgtgcaccagctaaaacctgggttgctttgactttattgagactagatgagaagcttggccagagaatacagctcaggaaatcaacaagggaacctcagatcaggcaggaaggaggaataatctggaattagagaacatagttgcctcacagtaaactcagacaatgaaccttgagaaatgaatagcttgaggaaccaagatgagaagagatcagttcagttcagttcagtcgctcagtcgtgtccgaatatttgtgattccatggactgtagcacgccaggccttcctgtccatcattactcttgtagcttactcaaactcatgtccattgagttggtgatgccattcaaccatctcatgctctcttgtccccttctcctcccaccttcaatctttcccagcatcagggttttttcaaatgagtcagctcttcacaacaggtggccaaagtattggagtttcagcttgagcatcagtccttccaaagaacattcaggactgatttcctttaggatggacatgttggatctccttgcagtccaagggactctcaagagtcttctccaaaaccacagttcaaaagcatcaattcttcggtgctcagttcagttcagtttagtcgctcagtcgtgtctgactctttgtgactccatgaatcacagcatgccaggcctccctgttcatcaccatctcccggagttcactcagactcacgtccatcgagtccgtgatgccatccagccatctcatcctcagttgtccccttctcctcctgcccccaattcctcccagcatcagagtcttttccagtgagtcaactcttctcatgaggtgcccaaagtattggagtttcagctttagcatcattccttccaaagaaatcccagggctgatctccttcagaatggactggttggatctccttgcagtccaagggactctcaagagtcttctccaacaccacatttcaaaagtatcaattcttcagtgctcagccttcttcacagtccaactctcacatccatacatgactattggaaaaaccatagctttgactagacagacctatgttggcaaagtaatgtatctgcattttaatatgctgtctaggttggtcatagctcttcctccaaggagcaagtgtcttttaatttcatggctgcagtcaccatctgcaatgattttggagccccccaaaataaagtctgtcactgtttccccatctatttgccatgaagtgatgggaccagatgccatgattttagttttctgatgttgagttttaagccaactttctcactttcctctttcactttcatcaagaggctctttagttcttcttcgctttctgccataaagtgtggtgtcatctgcatatctgaaattattgatatttctcccggtaatcttgattccagcttgtgtttcatccagaccagcatttctcatgatgtactctgcatacaagttaaataagcagggtgacaatatacagccttgatgtagtacttttcctatttggaaccagtctgctgtgccacgtccagtcctaactgttgcttcttgacttgtatacagatttctcaggaggtaggtcaggtgttctggtactccaatctctttaagaattttccacagtttgttgtgacccacacagtcaaaggctttggcacagccaatagatcaaaatagttttttttttggcaactctcttgcttttttgatgatgcaatggatgttggcaatttgatctatggttcctctgccttttctaaatccagcttgaacatctggaagttcacggttaacatactgttgaagcctgacttggagaattttgaacattactttgctagcatgtgagatgagtgcaattgtgcagcagtttgagcactctatggcattgcctttctttgggactagaatgaaaactgacctttttcagtcctgtggccactgctgagttttccaaatttgctggcatattgagtgcagcactttcacagcatcatcttttagtatttgaaatagctcaactggaattcctggagaaggcaatggcaccccactccagtactcttgcctggaaaatcccatggatggaggagcctggaaggctgcagtccatggggtcactaagagttggacaggactgagcaacttcactttcacttttcacttccatgcattggagaaggaaatggcaacccattccagtattcttgcctggagaatcccagggatggcggagctggtgggctgccgtctatggggtcgcacagagtcggacacaactgaagtgacttagcagcagcagcaactggaatttcatcacctccactagctttgtttgtagtgatgcttcctaaggcccacttgacttcatattccaagatgtctggctctaggtgagtgatcataccatcgtgaatatctgggtcatgaagatcttttttgtatagttcttctgtgtattcttgccatctcttcttaatatcttctgcttctgttaggtccatactatttctgtcctttattgtgcccatctttgcatgaaatgttcccttggtatctctaattttcttgaagagatctttagtctttcccattctattgttttcctctatttctttgcactgatcgctaaggaaggctttcttatctctccttgctattctctggaactctgcattcaaatgggtatatctttccttttttcctttgcctttcgcttatcttcttttcacagctatttgtaaggcctcctcagacaaccattttgcctttttcttggggatggtcttgatcactgcctcctatgcaatgtcatgaacctctgtccatagttcttcaggtactctatcagatctaatcccttgaatctatttgtcacttctgctgtaaaatcgtaagggattttatttaggtcatacctgaatggtctagtggtttccctactctcttcaatttaagtctgaatttggcaataaggagttcatgatctgagccacagtcacctcccagtcttgtttttgctgactgtatggagcttctctatcttagctgcaaagaatgtaatcaatctgatttcagtattgagtctctggtgatgcccatgtgtagagtcttctcttgtgttgttccaagcgggtgtttgctatgaccagtgcgttctcttggcaaaactctattagactttgccctgcttcattctgtactccaaggccaaattttctggttacttgaaaagagatatgacaactaaatacaaagcatgattccagacaaaaaaaaaaaataactataaaggattatggagtcaactgaggaaactggaatatggacaagagattagacaacagtattttatcagtatcaacttcttgattttgatctttgtactatgtttatgtaagagactgtccttgttcttaggaaaggagcttgatatcttcagtaaagggtatgtgagatttctttatactgttcttgcaaattttatataagtttgaaattatatcaaaatttaaaattactataaaaattagtagcttgtattcactggctagatgaacttctaaagttgttctaagttgtgttatgtgttttgtagatgcatgtgtatataatttatatcctcataataagaatatactagaaggaacatggttttagttgaagtcaagtggctttgattgagattgtaatggaaattctaacatgagagagatcagggacagaattatatattcctgaaatcatagttgcaaactgtcagctggtggcagcaaagatgaaagtaagggcaagccctatcaaatgttgaacagcacaaacatggagtcacacacaaataggtgtgaggcctgacagacctgggcaaattgcctcagcaaatatctatgatatcttcctgccctaaagactagtctagaatgagttgggacaggactctaggttttccacatgagagtatactctaaagagagtaagtatggagtagagatcttatactctctgccaattcagagcagaaccaaaataacaccttttctacctccaccctcaggacaatgccagaagaagctcagcttacaggcaatgtagaaataatttaagactctgtttttcagtaggggtgctattgccagtttggatgagacaactcttagttctagggactgtcttaccttatgagccatctccagtggctcaccacctttgattagtatgccattttgagcacctactcctgtacccaccatcacagcagttggagtagccagtcccagtgaacaggggcatgcaatgcatagaactgtgatagaggcttggaaagcaaagcgtattattgtttctgttctggagatacttctgttgtagcccttgagaagaaacatgaattttgattactgatttagaactgaataaaacaagaagaacaaagcttaactctaaataaaaccacaattctggagtaacacataatcctacttagctatcaacatatgttttaattactagtaagaaaacactttttttcttttatgaatataagaaattattgacataactgtaaacaagttacagttctaaaattcaagatttcaattttgctgattccagagttacacactatggagtgaatataaaaaacaagaaaagtaagcttctccactccccatattgagaataagtgtttttattaggcactttcagaaatagctgcaaacatgggatctaattctcaacatatttgacccaaaacaaaaataattctgtccttctgtatactaagaccataaaactgtctttcacacttctttttgaagacaatgaaaaaaatcactcagtttgcaaaggttggttaattatatctcagtaaaattcttttggacaaagcaatgttaatgagtgcatctggtagtaaagctcttactgacattgaatatgtgcttccatgagtaaaaatgattgatagtattatgagaaatcccctaagaccctctgaactcatgagaaaaattcctgaaggaaacacattccaaaatacttctcagcaatcctcttgtttagtgagtatttaaccaatgagtggtggtttcgtcactaagtcatgtccaacctttgcgaccccatggacagaggagcctgataggctatagtccatgggattctccaggcaagaatactggagtgggttgccactgccttctccaatttaaccaatatgaatcatttcaagaaactttttaatattatactaatgatcacatcatggaatagatgttctgattctacctgttctttaattgaagggacaaacactatgaaacaatgtatatataggatggcatttttaaaagaaaaaatacaacaaagatcttcttagtaataatggttttacagtgctgtattcttactaagttctcaaatactttttttttacatttttattttttaattttttttcatttttattatttttttattttattttatttttttactttacaatattgtattggttttgccatacatcaacatgaatccgccacgggtgtacatgtgttccccattctaagcccctctcccacctcaaatacttaaactaagtgatcatctaagagttatagagagagagaactggaaggtattttcatagacatctaagcttatgctttcatatatgtcttaaatgtatacactaattccaatcctgaaatttaggtattattatcactatgttacagatgacaaaactgaagataagagaagttaagtgaattaaaggttatatctctaacatgaggcacagtccaggtttactataccactttaaataccataccatagagactatcatagactttgagagaagcagacattaatattaccttaatattgggactgggggcaggaggagaaggggacaagagaggatgagatggctggatggcatcatcaactcaatggatatgagtttgagtgaactctgggagttggtgatggactgggaggcctggcgtgctgcaattcatggggtcacaaagagtcggacagaactgagcgactgaactgaactgaatattaccttatatttatacagagttcaataaattacaaagagtttctaatatatcatttaacttttatgacaactgcaagttatgttggatgagtactattaaaatctcacttgagaaaactgaagctcgaagagaaattaaattgacctcagatcacactgattgtgacagagctgagatttcaaggttttcctcaatatatccatagtcctttgtgaaagcaaaatcatgctaggattgagactgtgtataaaatgtgaaaggtcagtataggcatcgattgagttcagtcactccgttatgtccgacactttacaaccccatggattgcagcacgccaggcttccctgtccatcatcatctcccgcagcttgctcaaactcatgtccattgagttggtgatgccatccaaccatctcatcctctgccgtccccttctcctcctgccttcaatcttttccagcaattgggtcttttctaatgagtcagttcttcacatcaggcggccaaagtattggagcttcagcttcagcatcaggagcttcagcttcagcatcagtccttccaatgaatattcaggactgatttcctttaggatggactggttggatctcctagcagtccaagagactctcaagagtcttcaccaacactacagttcaaaagcaccagttctttagcactcagctttctttatggtccaactctcacatccatacatgactactggaaaaaccacagtttgattagatggacctttgtcggcaaagtaatgtctctgctttgtaatatgctgcctaggttggttatagcttttcttccaaggtgcaaatgtcttaatttcttaggtgtgatcaccatctgcagtgattctagagcccaagaaaagacagtctgtcactgtttccactgtttccccatctatttgccatgaagtaatgggaccagacgccatgatcttcactttttgaatgttgagttttaagccagctttttccactctcctccttcactttcattaaaaggctctttagttcttctttgctttctgccataagggtggtgtcatctgcctatctgaggttactgataatgatatcaataacctcattataggcatacctcagagatactgtgggttcagtttcagaccaccaaaataaagtgagtcacaagaagttctgaatttccaaagaaggtaaaagttatgtttatactatactatacactgtgtgtgttagcctctcagtcatgtctgattctgcgaccccatgacagtagctcaccaggctcttctgtccatgggattctccaggcaataatactgtagtgggttgccattcccttctccaggggatcttccttacccagggatcaaacccaggtctcctgcatttcaggcagattctttaccaactgagccatcagggaagcccatattgtacactatactgtagtctattaagtatgaaatatcattatctctaaagaaatacgtttggtgttggtttagtcactaagttttatccgactcttgcgaccccatagactgaagcccaccaggctcccgtgtctataggattttccaggcaagaatactggagcgggttgccattttcttctccaagggatcttcctgacccagggattgaacccgggtctcctgcactgcaggcagtttctttaccaactgaactaccagggaagcccccaaaaggccaaagaaatatgtatataccttatttaaaaagtaatgctgttgtaaaaatgccatcaatagacttgacacagggctgacacaaactttcaatttgtaaaaaacacaatatctgcaaagtgcaataaagcaaaatgcactaaaacaaggtatgcctgtacttgctttgggaaaataacaagttataatgaaaaaaagctttccaaaaggaaatcttttatggctacagaaatgcaaatgttattcttatcagcttttcactccagtctgttaaagataccagtaattattaaagttattttcaaattaattacttatgcaaaagattcataaactgttttatatatgataaagagatgtttataagtcactcacgggaaagtaggtttccacgagttcaaaattcagaaatccaattataatccaaaccaaaagggtagcaatggaaataataacaataaaaggaacaaagtagccactgagtttgtctgcaaactgctggataggagcctacaattaaaaaaataataataatgatatgtatgtgcaagtctcttgttttgataatgaatacagtagtattgagcagaaatattttaataaactccatattaatacaactggaattaaacaaaggaacctatcaaaactagaccaagatttatactgagtgggctttaatgaaaatactttctgtttctagggagttaagttacctttgatgtttgtgcctcctctacaagtttgacaatttgagaaagggttgtgtctgctccaacatgggttgcacggataaggagtgacccattctggttaatggaaccagcaatcactgtgcttccagatttctttgccacaggcattgcctcacctatggaaggaaaaaagatagatttagggagcataagtaaatactatcttgaaatacaccattatttgttaattatcaaaaaatcatctagaaaggagatacttccttcatgcaacagaatctggacaaacacctaggtgaaaattgcctgactttttccttatgccagttctgggccaaaccccagggatatatctatcttaaactggaaaaacctaatgtgctaactcttttggtaggtacttttggaactccacactagtcttagatcattggttctcaacctgttcccaaggagcatttataaatgtaagagagttcttgtctgtagtaactacggatggggcacagggtattgctactccaacttagtgggtcaggatcagggatactaaatgtaccataatgtacaggatagtcagacagaactaagaactgtcccatccaaataagcgatagcacccctactgagaaatgaagaatcctaaattattttcacatgcagttcataagctgagcctcttctggtactatgataaggattgaggtaggaaaggtattagtttggttctactttagattggccttagttatctaagatctctaaaactactccaggtctattctttttatagctgaccctgatgttgaaaacatggagtcctatcccagctaagactagatgggtcgttagagcagaaactcaggaaaatttgtcaaagtgtattgggctctccagcaggaatatgacaacttcttctggttatacattctagtaattaacaatcctcagtgaaaaagagccttcgtagcataagtaaaatcacaaagtaaatctgcagaaattgatttaataaggttttaaaaataactcatatcctctatgcttattatttattcagtccacagtttttataaaaagctcttcacctttcatgtgatttttaattaatactttggattcacttcaccttcatgtcatgatactctgaaagatcatacctgtgatgagggactcatctaccatagaatgtccttcaataacacgcccatccactggaaacttgcctcctggaaccactttaataatgtctccacgttgtacaagttccacatccacttgctcttcactacatatgagttaaaacaaaagttactatgaaaatctgcttctccctctgatctttccatgcaagttttatagttcacatcatgcttatggccccattaactgctaccaatggaagttagaaccaacacttgaattaggaactacaatgtcagtctttccttttcattggtggggaatagcttagtacctgcacaaagtagcactgtaaatatttgttgaatagtcattgaacaaatacatgaaagctttagaaataaagtaatagattttatttaacaaaaccacttatttacacaattttataaggacagaaatgaaaaatacaaaagaatgaaatataatcaagtctttagctctaactttcagtttacaggtaatataggagttatagaacaagttaaataattccagaaggaaacagagacaaatggactatgggatattttcagggacaactgacagatgtttctttaacaagttaaatgtatggaaagagggaggagcagcaaaaaatgagggagggagaactggagaggaggtattctagattaaaacaaacatgtcaggagaaagacaaactgtatgatgtgtgtgcatgtgtgtatgtgttcagttgtgtttgattctttgtgaccccatggcctgtagtttgccaggctcctctgtccatgggattctctggataagaacactggagtaggtagccattttcttctccagcagatcttcctgacctaaggatcaaactcacatctcctgtactggctgtgctgtgcttattcactcagttgtacccaactccctgtgatctttaccactgcaccacaagttcttactctgtatgatatcacttattatatatgtagaatctaaaaaatacaacaaactagtgaatataataaaaaagaatcagattcacggatacagagaacaaactaggggttatcagtggggagagggaagggtgaagagcaacactggtaagggattaagaggtaccaaccattaggtacaaaaaaacctacaagtatatattgttcaatatggaaaatatagccagtattttataataactacaaatggggtatacaaccttttaaactgtgaatcactatactatatacttgcaacacataatatcatacatcaactataactcaagtaaaaattaaaaaaaatacatgttagtcaaatgcaataacacatggactttgaattccattttaaacaaagaaactcaaaacattttggagacaacaggagaaatgttaataaggactgtgtattagaccatattaaagaattattgttcattttcttagatgcaatatggtattataattatataagaatatgtctttttttaaagatacaagaggaatattggcagtataaccatatgactgggatttactttaaaattctactacaacaaaagaaagatagatcatacagatgaagtaaagtgtggcaaaatgtgaataattgttaaatcttggagaaagattatgtgggtttattatacccttctctctggtttatgctcagtcaccaagtcatattcaactctttgcgaccccatggactgtaacccaccaggctcctctgtccatggaattttccaggcaagaatagtggagtgggttgccatttcctactccagcagaccttcccaactcagggatagaacccatgtctgcttcattgcaggcagattctttaccactgagccaccagtgaagccccacccttctctctacttctgtgtatattcaatatctttcctaaaaggtaaagaagaagaggaataatgaagataaatacctcaagaggatattatcagagtcaagagttacaatagttgcttctgtagcttgtagtgaaattagtttggcaagagcctctgatgttttgccctataaattaaaacacacatgtaaacaatgccaaggaagaaaaagtcttatgtaaaataaagatataatctttaacatttacctaagagaccactttaggaatgttaattagttcttatcagatgtctgactttgaaaataaaaagtacacaagatataaaatatattattaggcataattcataaaaataatgtataataagaaaaacatcagaacccaataggtacaaaggcaaaggacataaataagcaattcatttaagaagaaatataatacctgatgtgtagaataatgtttattactgatactaacagaagaaatgaaaactagagcaactctatgataccatttaatacctagtaacttggcaaaaatttagataggaatcggtgctgatgaagttgtagtaaaactacttacatactcttgatggcaaaaattgttaagattaatagcatgagcgatagaatatttatgtcctttaatcatatcttttgtaatttatcctaagatattaattcaacagaaataactattaaacatgaatatgtttaatgcaagattatctaaaattaaacactggaaacaatctaacttagaacaaaagcagaatggtttagtaaattatagcacaatgacttgagagagtattatttagaaatactgaataattatctagactgcaaaaacaggggaaaaaccttaaaatgttaagggtacaaagtggtatatataccgtatttgccactctgtaaaatataaaagaatatggaataggattggaaagttatttccattataacatgggactgtgggtgaatttttttccatcgttattttatatcttgtggtcacatcaatttttccattaataatgtgacgtaagtaaaatgtgcttgtgttgtgctgctgtttagtttgctcagtcatgtccaactctttcaaccctttggactatagcccatcaggctcttctgtccatggcatttcccaggcaagaatactggagtaggttgcggtgccttatgcaggggatcttcctgacccagggatcaaaccactggcaggcagattctttaccactgacccaccaggaagccctccaaaggcatacttaaccgaaaatactgctaaaataagaatatttcttttagtacatggttaacaacataaatcaatgtatatttccaataattggtctagaaaatattatagtcatttatctacccaagatttttaaccaatgtcacccttttttactttacctttgctacatgttccagccaccggcctagtgcaataaacacaaacagcataggaggtgtgtcaaagaaagtaacagggttcactttggctctctcatacattgcaaccagaagaataaccaaagagtaagcaaatgcaatggttgttgccagcacaatcaatacatccatatttgcagttttatgcttcagtgctttgtaggcctgaatatagaagtgccagcctccaaaaaactgtaatacagaaacagtgatcagtgctttttttaaaaaagctgacattcacatttatacctcaataactaagataaactatcaatgttaacttccttcagcttttatctaatccataaacaactaaggagaatttttttttagccacaccacgtggcttagttcccccatcagggacagaacccaggccatggagaaattcccctagagcttttctaaagctgaaacaaaagtgtttgtagtttagcagatacatgtgtgtagggattcaaattgctgtaaagcccttggcagccatcctcaatgatttaatgaatattccataatataaagaaagtcaaatgattattggatttttcttttgaagctagcaaaaacaagaactagggaaagaattacattctttgacaatgatttttttatataaaactcgccttcttttcaaaattcaacctgaatggtacatcacaagctactggctctgtccactgttttcattagaatgcataactgaaaacttacttttcattagttagagaaacatactaggatgttttaaaaatcattattgttttttatgaggatcagaaaaaggaataaatctattagaagtgttccaaaggaaaaatttatctgaaaagaagagttgaaaacatatcaagaataatgaacttaagtgccatggaaaaataataaaaataatatcactgttatgattatttaatagaataaataaataataaatatgctaaaataaaatatatcatataaaataattttaatgaaaatataaagaaataacatattttattattataataactgtaaatatgaagttgtacagagtggcagatatgaatgccaaattcatatctaaatacgaactgaactcttattatctgctctgtcattaaacaatatcctttagggattaaaatgaaattcattatctactttaatcctcagtttaaaattatttttgtaaagcatccagcataaaatgatcatacttctgaccagtatttgtcatacaattgaaaatagcctcacctactagttttgactagttttcattattaacaaatatacttgctaacatttcacttgcctgtacaggaacacacaataaaaaagatagcaaattcataatggacaatcctggcaggatctggcgctccaggaacatagaagaatgaatactgatcatttcttcttggctcatgttctgactatggtgaagacttgcaagatggtggtccataaccatcatatatatcatcagtcccattacaggtatacagaaaaacaggctcacaagaaaggcccgtcgccatctaatatagaaaagaaagatcatttgagtaaacatctaatggttaaagattctgtgtaccatagcaaaatataacttgtgaccaattcccacccagtgtaaggatgctattgaaaaaataactgacatgctaacagtatgttaaatttgtaacataaatcaaaatctgatttttattgacactccaaaagtacttactgtcttatttctcgtttatggtctaggtggcttgctgaccggtccttcttgaccaaagaagcttcaaaacccaagctctaaggaaattcatgagaaaacaattatttctctgaatttataaacattatgtacagaaattttaagctgtggtattgtcattaagaataattcaagtgcaaatcactatggggaatataaaggtgcttccttctcttgcatgcccagtcgtatctgactgttttgatgcctcagactgtagccaccaggctcctctgtccatggaattctccaggccagagtactggagtgggttgccatttccttctctattccttctcttaattatctttgtttctagtctttcatcaaagaaataaatgtttcctcaattctagttaatatctatcctactatttccaaattattgatttaatgcaagcgtagttgtcctcagtagaggttcttctatcaaaaagtaaactaaagcctctaataagtaattttggaaaaaaacaaagcagaaatctattgcttggttaagctgacaaactgtatgatgatctaataatgacagaactcagcagtaaaatcataaatcttacacttggacaagcatctactagtactgatgtatattgtagaaagtgaaagtgaagttgctcagtcgtgaccaactctttgtgactccatggactgtagcctaccaggcttctctgttcgtggaattttccaggcaagaatactggagtgggttgccatttaatcagtttatttttactcttagttttgacatctatctatccatccatacatcctcaagagcacagaaaactgaatgatagtccataaaagttagcaccatgctaaacatattattcaaggctttgcatatgtagtctttattctagcagttctagcagttctagcagaaataaataacaagaatgaaacttttcctcaataaaataaagtactgaaagaaaattatacctacataagtttcatatgaacatagtaacatacactatattttcagctgctagggaaaatgctgccttcttatattttttgacagtgtagcacagagaaaagagcaagcatgaacactggagtcaggaagattaggctcaaatccctggcatgacacttactagcttatgtgactttggggaagtaacttaacatctcataacctgagtttcctcacctacaaaatgaagacgacagtactgttgtgagaattaaatcaagagctgaagctttgcaatttgcgtacctggcacatagaagatactcgaaaatgctagtttcacaaatatgttaatggtactactgtctacattaacaggatcttatctaaatgattaatatgctttttaggtcattagaacaacaatgctacaccacattgaaacaatacatgctatacttcatatgtactgccatttatgagttactgaagaatacaggatgaatttgtcacagtgaaaaaggtttggtcttttatatttcttactttaactaaggtataagttaaagctttgacctaacaaacaatatagcatctagcaggatgtttcacttttgtaatgattaatatgaattttactcaaaagaaattatcctttacttatattttctaaacattttaaatgacctgaagttctacttcaagtcccatcctgattaatactatcaatgtgcctttagctaattcctcctgacaaagtccaaaaaataaaaaataaaacggtaacacatgcttattaaattttgagacaattattacctataaacaaaggaatcagatttttttcatcatttctttctgatataaaccagaagtgatctgagggagtgctgactggataggtaagaacatggaaatgtaaagtcttgaacttacttcaattgtatgaataatatctctgggaccaataatttctggatcatatttaatatgtgctttgttggttgccagggccacagagcagtagaagatccctctgtgttttgtgagagtagactctattttatggacacaggaggcacatgtcattcctctcacctgttaaagacaaaggctttgttattcagaaatgcacttatttccctccattaaacgtgttattactttaaactgaaagaaatcctataacatggtattaacacaaaaaatcttatctgcactattaatatgctttagatacgaccattagatcactgtttttatatcacattgaacaaagatatggtcccagctacaaaagttaagggcttcccaggtggtgctagtggtaaaagaacctggctgccaatgcagaagatgaaaaagatgcaggtttcatccctgggttgagaagatcccctggaaaaggaaatggcaccttactccagtattctggcctggagaatcccatggacagaggaaccgggtgggctacagtccatggggtcgcagacagtcagacataactgaaatgactcagctagcaacaggttaaacagaagaggatctcattaaaagtctccctcttcctgttacactcactgatagaggatttgacaactatcactgtttcttgtattcagtgccttgtttccctctaaatttttctcaccctgctcagttcagctcaattcagtgactcattcataaccaactgtttgagaccccatggtctgcagcacgccaggcttccctgtccatcaccatttctgggagcttattcaaactcatgtccatcgagttggtgatgccatccaaccatctcatcctctattatccccttctcctcctgccttcaatctttcccagcatcagggtatcttcaaatgagtcagttcttcccatcaagtagccaaataattggagtttcagcttcagcatcactcctttcaatgaatattcagaactgacttcctctggatggactggtttgatctccctgcaatccaagggactctcaagagtctttaccaacaccacagttcaaaagcatcaattctttggcgctcagctttctttgttggcaaacgtctctactttttaatatgctgtctaggttggtcatagcttttcttccaaggagcaagtgtcttttaatttcatgggtgcagtcactatctgcagtgattttggagcccaagaaaataaagtctctcactattttcattgtttccccatctatttatcctgaagtgatgggaccagatgccatgaccttagttctctgaacgttgagtattaaaccaacattttcactccactctttcactttcatcaagaggctctttagttcttcactttctgccataagggtggtgtgatctgcatatctgaggttacggatatttcccccagcaattttgattccagcttatgcttcatccagcccagcatttctgatgatgtactctgcatataagttaaataagcagggtgacaatatacagccttgacgtaatccttttcctatttggaaccagtctgttgttccatgtccaattctaactgttgcttcttgacctgcatataagtttctcaagaggcaggccaggtggtctggtactcccatctctttaagaattttccacagtttgttgtgatacacaaagtcaaaggctctagtgtagtcaatgaagcagatgtttttctgtaattctcttggttctcaatgatccaactaatgttggcaatttgatctctggttgctctgtgtgttcaaaatccagcttgaacatctggaagttcagggttcacatactatctcacatactgagaattttgagcattactttgctaacatgtgagatgagtgcaactgtgcggtagcttgagcattctttggcattgcctttctctgggattggaatgaaaactgaccttttccagtcctgtggccactgctgagttttccaaatttgctggcatattgagtgcagcacttgcacagcatcgtatttcaggatttgaaatcgctcaactggaattccatcacctctactagctttgttcatagtgatgcttcctaagtcccacttgacttcacattccaggatgtctggctctaggtgagtgatcacaccatcatgaatatctgggtcgtgaagatcttttttgtatagttcttctgtgtattctcaccacctcttcttaatatcttctgcttctgttaggtctataccatttctatcctttattgtgccctactttgcatgaaatattcccttggtatctctgattttcttgaagagatctctagtctttccagttctattggtttcctctatttctttgcattcattgctgaggaaggcttttttctctctcccttctattctttggaactctgcattcaaatggatatatctttccttttctcctttacctttcacttttcttttcacagctatttgtaaggcctcctcagacagccatttttccttttttgcatttctttttcctggtgatggtcttgatccctgtctcctctacaatgttacaaacctccatccatagttcttcaggcactctatctatcagatctaattccttgaatctgtttgtcacttccactgtaagggatttgatttaggtcatacctgaatggtctagtggttttccctactttcttcaatttaaatctgaatttggcaataaggagatatgatttgagccacagtctgctcccagtcttgttttcggtgactgcatagagcttctccatctttctgcaaaaattataatcaatctgattttggtattgaccatctggtgatgcccatgtgcagagtcttctcttgtgttgttggaagacggtgcttgctatgaccagtgcgttttcttggcaaaattctattagcctttgccctgctgcattttgtactcaaaggccaaatttgcctgctactccaaggtatctcttgacttcctacttttgcattccagtcccctataatgcaaaggagacatctgtttttggtgttagttctacaaagtcttgtagctcatcacagaactgttcaacttcagcttcttcagcattagtggttggggcatagacttggattactgtgatattgaatggtttgccttagtaatgaacagagttcattctatcgtttttgagattgcatacaagtactgcatttccctggtggcacagagggtaaagtatcttcctgcgatgcaggagacccggattcaatccctgggtcaggaagatcccctggagaaggaaatggtaacccactccagtattcttgcctgcagaatcccagggacagaggagcctggcaggttacagtacatggggtcacaaaaagtcggacacgactgagcgacttcactttcttttctttcactgcgtttctgactctttcattgactatgagggctactccatttcttctaagggattcttgcccacaatagtagatataatggccatctgagttatattaacccatttcagtccattttagctcgctgattcctaaaatgtcaatgttcactcttgccatctcctgtttgaccacttccaatttaccgtgattcatggaccttacattccaggttcctatgcagtattgttctttacaacttggaatttacttccatcaccagtcacaatcacaacagggtgttatttttgctttggctctgtctcttcattctttctggagttatttctccactgttctccagtagcatattgggcacctactggcctgggaaattcatctttctgtttcctatcattttgccttttcatactgttcatggggttctcaaggcaacaatactgaagtggtttgccatttccttctctagtggaacaccctgctaaagcatatgtatgtatgtaggtatgtatgtacatatatatgtatgtatgttcatatatatcctttagtattacttctagtgaaggttaataaatgacaaaagtgttctacctttctccaaaaatgtattttgtcctatgtcttgagtaaagttataaactctacagtggaagggcaggacttctggaatgactgtgcaaggagttcagcaaatccttgctccaaatggcaatgattaaactgcaaagtttaatcactggacaaaagtttcaaaacccaaccactgaaatattatgagaagtaaccaaaaggattatgtaacaacttacaaagtatttattcaagaatatccactaaaagaacatcatcaatagcagaggaaggatttctgaaaattctcccctccctaaaagcaatgagaaaatctgcaaaagttgtcagtaccaactatttcagaaaagttagaaagttggtgggaatgaaaattgctgcagccactatgtaaaacaagatggatcttcctcaaaaactaaaaatacaactaccatatgaccctgcaattccacttttgggtacaaatacaaagaaagcaaaaacactagttcacaaagatacaagtatctcaatgttcatagcagcattatttacaatagccaagatatcgaagcaacttaagttccatcaatagacgaatggatgaagaatatgttgtatgtatgtatatgtgtatatatatacacacacacacacacacacacacacaggggaatactactcaaccacaaaaagaatgaaaatttgccatttgcaacagcatgaatggagttggaggatatcatgcttagtaaaataagtcatacagagaaagatgaatactctattttatcatgtatatgtggaatctaaaaaataaaacaaatgaatataatgaacaggaacagaatcgtagagaacaaattagtggttatcaatggggagaaagtagggaagagggacaatataggggttgggattaaaaggaacaaactactatgtacaaaataagctataagtatatattgtacagcacaggatatagagccaatattttacaataacattaaacagaatataatctgtaagaattctgaatcactattctatatacctgaaactaatataatattgtaactcaactacacctcaattttaaaaacctgattaaaaaaaagtggaaattaaaagcttacagcaatacaggaagcatttattcaaaacaatcagataaattccagtaaaatagtaagctatgtggcattacaatttgctttattcccatcccctctgtccagctcggtggtagctatgaagacaaacaggccacaatcatggtgaaaaacagcatcaggggagccaccagagagaaaaaaaaggattggcatgtcttcaaagtctcattcccatagaactgccgttatttgacctgtctgatggttctctgaaatattccacttgcaaagctgtctgtctgtccccgaccatctcagtgcatacaaaaagccttttccccaggagaatctgtcaaaacaattaggggaaattatttaaccttatggctgcctgagccaacggataacagctggggaaaacaacagactaacaaaagaccctaaaagggaaaaagctgggaaggaagatgtccataagagttccagcacattcctaggaatctagaagaccatgcacatgcatagggctatgcacatgttcagggctgtgtgtatcttcagaaaagaactgaaagagccctaagttctcacctcaggctgacctttaggctctgtagaagcaggaattgaagtttaaggcaaaactgacaactgcttggctgagtgttcaaggcatgcctcaacatttacaaagagctatttagcaaagacttggatccttttttttcttttttaaaaaaaattatttattttttaaatgaaggcaactggtttacaaaatttgttgatttctgtcaaacttcaacatgaatcagccataggtatacatatatacctatatgtctgctccctcttgaaactccatctgatctccctccccatcccacccctctaggttgatacagagcccctgtttgagtcccctgagacatacagcaaattcctattggctatctattttacatacagtacagtaaacaaaaacaagaccaggagcagactgtggctcagattatgaacttattaccaaattcagacttaaattgaagaaagtagggaaaaccgctagacctttcaggtatgacctaaatcaaatcccttatgattatacagtggaagtgagaaacagatttaagggcctagatctgatagatagagtgcctgatgaactatggaatgaggttcgtgacattgtacaggagacagggatcgagaccatccccatggaaaagaaatgcaaaaaagcaaaatggttgtctggggaggccttacaaatagctgtgaaaagaagagagccaaaaagcaaaggagaaaaggaaagatataagcatctgaatgcagagttctgaagaatagcaagaagagataagaaagccttcttcagggatcaatgcaaagaaatagaggaaaacaacagaatgggaaagactacagatctcttcatgaaaattagagataccaagggaacatttcatgcaaagatgggctcaataaaggacagaaatggtatggacctaacagaagcagaagatattaagaagaggtggcaagaatacatggaagaactgtacaaaaaagatcttcacgacccagataatcatgatgatgtgatcactaatctagagccagacatcttggaaagtgaagtcaagtgggccttagaaagcatcactgtgaacaaagctagtggaggtgacagaattccagtggagctgtttcaaatcctgaaagatgatgctgtgaaagtgctgcactcaatatgccagcaaatttggaaaactcagcagtggccacaggaccggaaaaggtaagatttcattccaatcccaaagaaaggcaatgcaaaagaatgctcaaactaccacacaatttcactcatctcacacgctagtaaagtaatgctcaaaattctccaagccaggcttcagcaatacgtgaaccatgaattcctgatgttcaagctggttttagaaaaggcagaggaaccagagatcaaattgccaacatccaatggatcatagaaaaaccaagagttccagaaaaacatctatttctgctttattgactatgccaatgcctttgactgtgtggatcacaataaactgtggaaaattctgaaagagatgggaataccagaccacctgccctgcctcttgagaaatctgtatgcaggtcaggaagcaacagttagaactcgacatggaacaacagactggttccaaataggaaaaggagtatgtcaaggctgtatattgtcaccctgcttatttaacttatttgcagagtacatcatgagaaacgctgtgctggaagaaacacaagctggaatcaagattgccaggagaaatatcaataacctcagatatgcagatgataccacccttagggcagaaagtgaagaggagctaaaaagcctcttgaggaaagtgaaagaggagagtgaaaaagttggcttaaagctcaacattcagaaaacgaagatcatggcatctggtcccatcactccatgggaaatagatggagaaactgtggaaacagtgtcagactattttttgggggcttcaaaatcactgcagatggtgattgcagccatgaaattaagacgcttactccttggatgaaaagttatgaccaacctagatagcatattcaaaagcagagacattactttgccgactaaggtccgtctagtcaaggctatggtttttccagtggtcatgaatggatgtgagagttggactgtgaagaaggctgagtgccgaagaattgatgcttttgaactgtggtgttggagaagactcttgagagtcccttggactgcaaggagatccaaccagtccattctgaaggagatcagccctgggatttctttggaaggaatgatgctaaagctgaaactccagtactttggccacctcatgtgaagagttgactcattggaaaagactgatgctgggagggattgggggcaggaggagaaggggacgacagaggatgagatggctggatggcaacactgactcaatggacgtgagtctgagtgaactccaggagatgttgatgaacagggtggcctggcgtgctgcgattcatggggtcgcaaagagtcggattcaactgagtgactgaactgaactgaatgtaagtttccatgttactctctccagacatctcaccctccctcctcccctctccccatgtccataagtctgttctgtatgtctgtttctccattgctgccctgcaaataaattctttggtaccatccctctagattccatatgtacgtgttcagttcagttcagttcagttcagttcagtcgctcagttgtgtccgactctttgcgaccccatgaatcgcagtacgccaggcctccctgtccatcaccaacccccagagttcactcagactcacgtccatcgagtcagtcatgccatccagccatctcatccttggtcatccccttctcctcctgctcccaatccctctcagcatcaaagtcttttccaatgagtcaacttttcgcatgaggtggccaaagtactggagcttcggccttagcatcattccttccaaggaaatcccagggctgatctccttcagaatggactggttggatctccttgcagtccaagggactctcaagagtcttctccaacaccacagttcaaaagcatcaattcttcggcgctcagccttcttcacagcccaactctcacatccatacatgaccactggaaaaaccatagccttgactagatggaccttagtcagcaaagtaatgtctctgcttttgaatatactatctaggttggtcataactttccttccaaggagtaaacgtcttttaatttcatggctgcaatcaccatctgcagtgattttggagccccccaaaaataaagtctgacactgtgtccactgtttctccatctatctcccatggagtgatgggaccagatgccatgatcttcgttttctgaatgttgaactttaagccaactttttcagtctcctctttcactttcatcaagaggctttttagttcctcttcactttctgccataagggtggtgtcatctgtatatctgaggttattgatatttctcctggcaatcttgattccagcttgtgtttcttccagtccagtgaggcgttagtatatgctatttatctttctgactaatttcactctatataataggctccagtttcattcacctcattagaactgactcaaatacattactttttatggctgaataatattccattgtgtatatgtgccataagttctttatccattcatctgtcaatggacatctaggttgcttccgtgttctagttattgtaaacagtgctgcaacaaacattggggtacaagtggtttttcaattttggtttcctcagggtatgttcctaggagtgggattgctgcatcatatggtggtttcattcctaagggctgggatacttattggttccagatatttaaggaaatcactgtggagttgttagctaactactgagctaaccagagacttcagtggacacacataacaaagaacattgactttatataatcagttcagaaatcactaaaaaaacagtaacaatgacaaataacaagaaacaacaagccataaggctaacagtaatctttcaacagaaactctgcagaccagaaaggagtggcaggatatacttaaagtgatgaaaggaaaaaaacctacaatcaagattactctacccagcaagaatctcattcagattctaaggagaaatcaaaagctctatagacaagcaaaagctaagagaattcagcagcaccaatccagctcttcaacaaatgctaaaggcccttctctagacaggaaacacagaaaaggcatacaaaatcaaatcaaaaataataaaataaatattaacaggatcatatttatcaataatcaccttgacataaatggattaaatactccaaccaaaagacaaagactggctgaatgtatacaaaaacaagatccctatatatgctttctaccagagactcacctcaaacctaaggacacatacagactgaaagtgaggggctgaaaaaaactatttcatgcagacagagatcaaaagaaagtgggagtagcaatagttatatcagatagaataggctttaaaataaagaccatcataagagacaaagaagttaagtgaacaagacaaagtcactcagtcatgtctgactctttgcaactccatggaccataaagttcacggaattctctaggccagaatactggagtgggtagcctttcccttctccaggggatcttcccaactgagggatcgaacccaggtctcttgcattgcaggtagattctttaccagttgagccacaaggaaagcccaagaatactggagtgggtagccaatcccttctccagtggatcttcctgacccaagaatcaacccacggtctcctgcattgcaggtggattctttaccaacttagctatcagggaagccctaaggacactacctaatgatcaagggatcagtccaagaggatataacgattattaatacatatgcacccaacataggagtacctcaacacacaaggcaaatcctaactactgttaaaggggaaactgacagtaacacaataatcgtgggggactttaataccccactcacaccaatggacaggtcatccagaccaaaaattaataaggaaacacaagttttaaatgataccttggaccagttggacctaattgatatcgacagggcatttcacccccaaacaatggatttcaccttttctcaggtgcacatgaaacactctccaggagagatcacatcctgggccacaaaccaagccttggtaaatttttaaaaaactaaagtcatttcaagcaccttttctgatcacaatgctgtaagattaaaaatcaactacagggaaaatctataaaaaacacaaccatatggaggctaaacaacacatttctgaacaaccaacagatcactgaagaaatcaaaaaggaaattaaaatatgcctagaaacaaatgacaatgaaaacatgacaaccccaaacctatgggattcagtacaagtggtgctaagagggaagttcatagcagtacaaacctacctcaacaaacaagacagacatcaaatacacaacctaacctaacatccaaagcaactagaaaaagatgaacaaaaacccaccaaagttagaagaaggaaagaaatcataaagatcagagcagaaataaatgaaaaagaaatgaagaagactatagcaaagatcaataaaactaaaagctggttcttcgagaagataaacaaaatagataaaccattagcaagattcatcaagaaaaaaaagggagaagactcaaatcagtaaaattagaaatgaaaaaggagatgttacaacagacaacacagaaatacaaaagatcatgagagactactatgagcaactatatgccaataaaatggacaacttcaaagaaatggacaaattcttagaaaagtacaaccttccaaaactgaaccaggaagaaatggaagatttgaacagaccaatcacaagcacagaaattgaaactataatgaaaaatcttccaacaaacaaaagcctaggaccagatggcttcacaggtgaattctaccaaaagttacagaagagctaacacctatcctactcaaactcttccaggaaactgcagaggaaggcaaactcccaaactcattctatgaggccaccatcaccttaataccataacaagacaaagatgccacaaaaaaagaaaactacaggccaatatcactgatgaacatagatgtaaaatcctcaacaaaatgctagcaaacagaatccaataacattaaaaagaccatacatcataatcaggtgggctttattccaggaatgcaaggattattcaatatatgaaaatcaatcaatgtgatataccatataaacaaattaaaagataaaaaccatatgattgtttcaatagatgcagagaaagtctttgacaaaattcaacagccatttatgataaaaactctccagaaagtaggcacagaaggaacatacctcaacataataaaagccatatacaacaaactcatagcaaacattatcctcagtggtgaaaaactgaaagcatttcctctaaaatcaggaacaagacaagggtgcctactcttaacattacttgccttttgactttggttatggttttttctccaaacatgaaatttttatgtacccaaatttatcaatcttgtcttttatgcattttgtatgacacttaaaaagactcttcctactctaatattattttttaaacattaaattaggtgttatcattgggaaaagctaggtagtggttacaaggaaatcctctgtactatttttgcaacttctttgtgattttaaaattatttccacaatggactgatggactaatgtatgataaaacaaatagagtaaaacgttaattgtagaatacatgcagtgtgtttgagagtgttcaactgcacaattcttttgacttttccaatgtctgaaatttttataataaaacattgaaaaaaaactctaaatatgtcttctagtaatttcatggttccatttcttacattcaaatttttgtctgagctggaactttggtacaaggttaaattttttgttttaattatttaagttatacaaataaaatattttctgggttggcaaaaatgtcattttaaaccaatataacttatacctagctttatgactttatttataaaatttaagtctttaatacatctagaatttattcttttacatgctactaggtaggaataatactatatttttaaagttaattttcatttattcattcaaacccaattcctgtttattggttcttaatagagatgatgattatcttttacattctgcacttgaaagtcaccactgtcaatatctttccaatttccttcattttcattttatgttttactttcccaacattttaattattttttgatctcttttctgatttcttgccaagtttttcctggaaattctattaaccaacaaaccttcttacttacaacaagttccaaaacaccatctccttcatcagcattttctatcacaatggctccaaatccaagctctcggattaactcggctatcactgggggttgtatgagagcagggttatacctcacttctgccttgccagccatcagagccacaagtacagaatatattcctaggaatattgataagaaaaacaagtcagataacatttctcataaaagagtagtctttaaaaaaaatatttatttatttgactgtgccaggtcttaatgcagcatgtgggatctaattccctcactgggaattgaacccaggtcacctgaatttacggcattgagtgttagccactggcccattagggaagttcccaagaataactttatagtagttttcttttcatttaactatggaagggttaagtgaatctggaaaattttatttcttcacttttatacaatcttgaacccaaataaaatttttgaaaacttgttctcatttttaaaaactttttattatggaaaatttcaaatacacacacacacacacacacacacacacacacacacacacacttaagacagaacaacataataaactcaatgtatccatctctcagcttcaataactatcaataatactgggttgctcaagtttcatatatattcctacccactcatccctactctctaccctgattattctgaagcaaatcccaaatatcatataatatgtaaaattttaaatatgtatctctaaaagataagactctttttcttggacttccctggtggtccagtggctaaaaatccacttgccaatgcagagaacatgggttcaatccctgatcacaaggatcccacatgctacagggcaactaagcccatgtaccacaacaactgagcctgcaagccacactattgaagcctgtgtccctagagctcgtgcttcacaacaagagaggccaccacaatgagaagccctcgcactgcaactagagaagccccgttcaccacaactagagaaagcccacacacagcaaaaattgaaaacccagcacagccaaaataaataaataaccctttaaaaaaagactcttaaaaaaataataataccattatcaaacctaaaataattcttcaatatcatcaaacatccaggcaatattcacatttccacaactgtcttagaactgtttaacactgtttgaattgcgatccaaatataaagtatttttaggaaatgaatataaagtatttttagaaacctgtaagatagagtcctagagaaaagaactcatttacttaggaaatcaatgtaattgtagcaaagaatctaagaatataccaacatacgcattataatattatcaaataacagtcatttctctctcaaattgtattgcctgacacacattaatctaaaatgctcttattccacccccctccaaaaagtgccatacagcttaacaaagcagttcattttatggcagtcatgctgttctctggtatcagcattttgttaacaaccactccacttctctaggtcagctattgctgtcatttccaggaagaaaattaataacatgcagcagaaatggcagttccttctaggaatctgtggcacttggtggctacctgacagggaataggaatcagcaatccataggtcagcactggggtctgataaaaatttaaaaatatccaaatactaatttaataatagtttttaatatgaaaataaactatctaatataatctaagctttctatatgaaattggctaccaaaaaaaagtactcttttctttggagaaaaaaggtagttacacactgggctttgtgagtaccaaataattcagaggatcggatcataggaaagtatcggtgataagagaagggtatagggaaaggaaaaatatcttttcacttcagttgaatgtaatctatagccaaaaagaaacagaaaatctgttttttcaagtttcaaaaatattttatacttttataaattatggacaattttttaaatttttacttcaaaatacaattagaacttttttctattcatttttaaaaatataatccagatgaaactgagggaagaccagtgccacttaattaaaaaaaaaacagaagtgaatataggtagattgtgaatgcagtgaatgttgacccgagctaggccaaagatatttctaaccaggttaaaaggtggtaaaggagcaatagaaagtaattgaaacaatcagttttagggatttaaaaaaaagatctgtaattgttatctgcagtagccattgcttgtcgcatgagaaagtctatatctgaacttctcctaaaatagttggttctaaagttaaacaagccccttggaaatttctttttgctttcattttcttgcaaccttcctcctattcttgttaatcacttaaacaaagtataatttagcccagactgcattctaattagatataatgcaagatgaaatgaaggatgtagaaatgacagaatgtggacaagataatattgaacttaagatagctctagtatataataatacattttgttacaataatgttctgatctttacatataaggtgagtttactagccataggtctgtactattactctatatactttatttccccaatagtgatgataagcttatactaatcttatttaatcagcccttgtgactatcagcaagatacctggggctagggctacctgagtaccaaacctatgacttcaggctcattaaacataatcacctatctctatggttaacaaatctactacactatgcaatgaagtccattaatgtgagtgcaaaattaaaagctaaaacatctgagtgtgactaaataaacaaacatattgcagattttctaaaaatttgtaaccaaaaatgaaaacttgtacacaatattgagtaacttttgaacacttttactgcaagtaaagatcagtaatcaaactgctgcaagagaacaattctaaaacttggctttggtccagtgcttgccctgcgtatagtaatactgaaaattatggattctagctgttagttttaagcatagctttatcagaaaatttatgtttcttaaaatccgctgcagccaaggtccataaagaatagtaatcttatgtatttccttctgctgctgctgctaagtcgcttcagtcgcatccaactctgtgcgacaccatagatggcagcccaccaggctccgccatccctgggattctccaggcaaaaacactggagtgggttgccatttccttctccaatgcatgaaagtgaaaagtgaaagtgaagtcactcagtcgtgtccaactcttagtgaccccatggactgcagcctaccaggctcctccatccatgggattttccaggcaagagcactggaatggagtgccattgccttctcctttccttctgctatttgactacaaatttcactgatattaaagtgcagccatgagattaatgagacaggaactatatctaagggaacaaaaactggctatgaggaagtcaaggttgtcctgtaaatcactgatagtctttatgaggccttggcaataatcataaacatggttacaaaacacataagaggacaaaaaggacagagttctcaaattagtacataaaatagcaagttttaagaatgtcttaccttcttctcgtcttaaattccgttcaatgtttgctacacaggaagcacaagtcataccagtgacctgtatataacacttagatgaagtctttggctcctccttgtcatgaattggtgtcatcattttagtgtgaaattcattagttgaggtcaaaagtggcatttctgatgagggctgagctattactaccaacggttcatttgtatctggtggacagggaaagattcttttcatttgaggtattctccagctgcatcctcgtcacttatcacaatccacacctcctggcactgtcaacactgctgcagctgctgctgctaagtcgcttcagtcgtgtccaactctgtgtgactccatggacaacagcccaccaggctcatctgtccacaggattctccaggcaagaatactcgagtgggttgccatttccttctccaggcactgtcaacccattcctttaaaactgtcatggacctagagccctgtgcaatgctatctttacactttccaggatgtgacttccaagttcaacactgcccatcccaattcttgggaaaatcggaactagctgaataaacagaactttatatcaagatcttcaagcccattatctctaccccaaactccagtagacagtggtttattaatagaaaggatttagttttataatgaatttctatcattatgttaatgatttacatactggcagtaaagcaattcgtgtaagtgggacaaaaagcaatctgcaaaacagcaatgcagtacaatgtcatttaaaaattgttagagtgcatacacgagaacatgcataaggaagcctaggaaggtacataccaaactactagtagaggctatttctggggaatcaggttatagtaggaatagaataacagaaagatgaacaaatttcctctatagacactgctgtatgcttgaattttaacaataatacatagtgttttttaaattaaaatgtctttggtggacaatggaagaagaggcaaggagtaagtcagcaataatcttcatttttcacaaagtattcagagaatttttctgtagaatgtttatggactgtgaaacagtggaaagcatctgtcatcccagaagctcccctgcagtcttagcggagacttagtttatccatttcagtattaatcacctcccaagaaaggagaaagtattctttttagcacttccatgtgcctgctaaaaagctaaagattttcaactctgctgcagtgataaggaggaaaagaagtgatgtggaaatttccactaatgtgttacttctttcccttgggcaaaaaactgattcaagtctatttggctagtccatagaggaaacccttcatagcagagctggttttcaggataccgaaaaaaggcatcttttgaagaaactttaacaaaagcctgaccacttccataacaaaagcctgacttctcaaatcagttataataaaggctcttaaattttgacatacaatcacctgggggatcttgttaaaatgtagattctgattcagtacattgagggtgaggcctgaaattctgtttcaataagcttccaagtgatggcagtactgccagtctgggtatagcaaaggacactttgaatagcaaaggatgagattctcctaattccaaaattagacagtctctgatcttatatgtgaatcaattcagaaaatggtattcattcagattatgagagtattatttagaacaaagaggataaaatttaccaaatagtaccaaaagttcaaaaaggaggctcatttgctcaaaggaaatagctttggcttgggggtagaaacattattttagtctagccaagagcttattcattctatcctaattattatgaagatttaaaattttgaacttggacaatgaaaagaaagtttatattaccaattactttaactcttattaaagagtaatttagttatttcaaataccagaagtaaccaaaacaccatctgcaatttcacactctagaagtacagtattgaattaaaataagtcatagaggtaagcccttttagttacaatggcatgatttctcaacaaagattcacaaaattgtgacctttaccccagtgaatgtggcaagagcaaatgcttccatctttcacagaggcagtacaggtgttaaaaagccacagtgaattaaatggctagtttctttaaactggcttttctataaactgtagcaacactacttatgtataaatgaattcaaaagactgactctcccgcatgtgaggcaacaatcagaaaagaatccaaaaatttcaagaaagggtttctagtctgatcctcaaaactggcaggtttagtctaaagtaatatgaataaatatataatcagaaaatggcttaaaaacaactatgtttatgtttaactataaacatcatgtctgcaacttactctcaaatgattcagaaaaaggtagctacgtgtgtgtgtattgtgtgtttgaatatatgtctatagacatatgtttaaagaaaagaatgataaaacaaatgcagcaacagtattaacaatggaatccgagtaaaactggtaaacaggaattctttgtactattcttgcagcttttctgtaagtttgaaattagagattaaaaagttacaaaaaaggaaaaggaatttaattgagtattttgtttgctttaattggttagtgaagacaacttcatatattatatatcttcttacgataatgacgatattggtggtcatgataaaaagcacctcctatatttctatttcgtttattaacatttattgtccacccaggactggtatgacatgaaggcgaaatgcaatgatccctctaagtctatatgaacaggtttcagagtggtagactatgaagcctggaccggcactgacactaacattcagaaaatgggcagccacaattctggtggcatcttaaactctgattgatctatagccgaaacacacaatgcagtcaattgatattaactttttatcccaataatataatatgggttactgtagtcataatgcatgttattttatggtcataatcactttgccaaggttttctacctattcattatggcttttagaatgtttgttattgttgctgcttagtcaccaagtcgtgtctgactcttttgtgaccccatgaactgtagcctaccaggctcttctgtccataggatttcccaggcaagaatactagagtgggttgccatgccctcatccaaaggatcttcctaaccctgcgactgaacccatgtctcttgcactgcgggtggattctttaccgctgagccaccggggaagtccaatgacactgtctagaaattagttattcaacttttccattaatattcagagcaagaaatttcatttagggaatttccagtttaattcaaggctaggttcaattctagttcaaaacaagttcacatgggcaaattccattggatatacatctctggtttcagttcaaggtaagagctaccagaaaacaggaagactttgggccagttctagagtcaggttaattagaatgcctaaatttgaaactacagcttaaatctactatttatctctactattttcattttctttttaaaatttttgtttgcaatatagttgatttacaatattatattagtttcaagtgtacagcatagtgaatcagccatacatatacatatatccactcttttttttttttaagattcttttcccatataggccattacagagcactgagtagagttccctgggctatacagcaggttcttattagttacctgttttatatataatagtgtgtatatgtcaaccgaatctccccatttattcctcctccccttatcccctgctaatgtaagtttgttttctacatttgaggctctattttttcttttaaaataacatttgcttctcccatattatatatacataaatatatacaaatatacatataaccctgtcacaaaaaacttaaaatacataggaaagcacaatgaaaacaaattatcacctttaccctaccactcacaaataactacgtttaaaattttgttcatattctaccaggaattttattcatatacataaataacaaacatagcataaatccttatacatgtgtttataaaattttgaccatatgactttttcacttgctttttcatttagcaaaatatctcactttcccatggcattaagtatcttcaacaccataatttttatggcttctgagcatttcctcatatggaggtatcatgctttatttaatgtttctagtttctatataattatgcaaacatcattatgcatctttatatatgtttcatatatgctgctgacatatgtcatatttctaaaaagtagaactacagtgcctattactcatttttcactgataaaagccaaaagaattagcaaagtgtaaataaaagaacattagaggaatcaaagaaaaaaatgataattacctgacaaggaagcatcaaatcccatgttttctatggcttctctcaaggtttctggagaggttagtaaaggatcatactcaacagtccctttgccatttgcaagtgatacttgaatggattttacacctgccttttttgatatgacaccttcaatagactgcacacatgaattacaagtcatgccatcaatgtttatcacagtttcttgagttagaggctggctaactatgttcaaaggactcttttggagagatgaactggagggagagtttgaggtactctcaatttcacttgcactactaactctatattgcccttgtgatatggcctctattgcttttttcagtgtttctggagtgactaaacttgcattgtactttactatggcagatttattctctaaagaaactactacactgcttatatgttggagtgtagataaagcactttcaatatttgacacacatgatttacaatgcatgccatctatggtgaaaatgactgttgaattactggtgtatgatggactcctttgctgtgatccttctgaggatttgactggtgtgttctttagacgttctatgtcaatagctcccaatttgaggtacttgggctgttttttgatgaatgctgtaaagcccacaacttcaatctgcttttttatttcctctgctgtgataagatgaggttgataaacaacagtagcttcttgactgtccaaggaaactagttaatagaaagaaaaatatttaattcagttattcctgagccacttcagaaaacattctgtagaccaaattaataccacacataattgtttctctctcattgttgtcattatcctttcttaaaataattctgttcttttcagaaaatgttactgatgtggactagaaaaaagcaaaagatgtgaccactgtatctgtggtctccaagtttctgcatgcctgaatagaaacagaggtcaagaggaccctaggcatgttgtgttaagaaccctgaactccatgaatgccaccttggctgccttttatgctagttcaagattcatgtaacttttaattataatcattaactttacttgacattaatcctgggaatacactgtttctcaaacttcaatgaagcagtaacattctagtcccacagattcaaaacccatgcttaaaggaaaatgctaaagttaaaagaccaaaacagaaaaccaagccttataaagcaatcaaataaacaatatcagtcatactacctttaattcgctgaacaccttgcagtttcccaatttttccttcaatggtgctagtacatgaatggcaggtcatcccttccaccttcatcttcagcatgacttcacctggttgagccatactataatcttcgcaagttcctgactttttttccagagttccagtatctaaactgagatcaggaaccagctctactatctgattggcattcactatagaagggattattgtcaccactgcagttctctgctgaggggaaattttaatatctgtcacacccttggtcttgagcaatgtgctttggatatggtcccatggcggaaccagtgaagcagtaacagtcagaaacacagtttcagttaaaacagggagaggcttaggattgtggagaatagtatcaaagcccatgtcatcaatagcttcctgcagggtctttggagtttgtagtttggggtcataaataatagttgcatttttttcttccagtgaaaccttttggaaggaaattgcagaagtaattttaattaaattttatgatatggaacttaaaattatcaatcatcacaccaccatcaagaatgaaacaaataattaaatcaaatagagcttctttattagttctcatctttcctattctctttagaaagtagcacaaaatgtcttgtgtacctacaggaatggtaaagctctatgtaggtgtacttgactcaggtaatgattaggcatttgaaatgtgcacagacaaacacaccttagaatttcataacagagaacaaactactcttcatctcctttcacaaaatattccaacacttagcactctaccaattcaaaagataatttcaggaaagaggatcacctacataaaacaaattggaaatgaagtttaaagttttaaaatgttcaattaagataaacttgttgcaagaaaaggtataaacatgctggtttatgaaggccaatattcataggtttttttttttctttcacttgattttatttttttcctttcacttgattttagcaagtatttctataaccttctactatagtccagtattacttttgtgcaaaaaaagaacatctttatcatttttcctgatttgattattaaaataattattgtattcttaaagctcagcaactgaatataatttaactactacctggacatcttaccctgcatctctttgggtaacacatgggttataaagatttatgaagtagtcacatacacacacacacaaaaaaaaaactgggttgagtcagaagatttgagctccagtgtcaattctccatttataagttaaccacactcactagctctaccatcagaaaaatgaagaaatgtgctctattatcttccagggttattataaggatcatatgagtaaacaggaaagtagttctttgaagcagtaagtcatataaaagtaaacactgcaaaactaatatttatcaaacacttattatatgtgccaggaactaagattctcatgatacaaagctgatcatgacatagtcacagggagcaatgctagaacagaggacagaaaaaatgaatacccattcatccctgggaatgtgtgtcaaaaaagcttcttaggggagataatacttgaatgttaaaggaataacagaaattagcaaggacatttgaagcagggaactcatgacaaatgtaaacacaaaagtagagaaaaatgaaaggctgcataattaggcaactgctttatcatgggggctcttgtatgccaataatcatctgtactttattctataggtaatagagagtcatggaaaatttaagcaggggaatgacatagttatatttgcatttagagaagaatcattttggagtgatggaactgtgctgccctggcttggggtagttaaattaatctatgtgtgttagtcgctcagtcgtgtccgactctttgcgaccccatggactgtggcccgccaggctcctctgtccatgggattcttcagggaagagtactggagtgggtggccatttacttctccaaattaatttatacatgtgctaaaattaaccaaacctaaagaaagcaagcaaacaaacaaaaaattcatagaactgtatgccaaaaagaagtcaatttgggggtataattttaaaaacaaaaatgaaaagattaaaaaattcagttcctcaattgcattagccacatttctagtgttcaatggccaatgtggctgccacaagggacagagtaaatacagaacattttcaccattacagaatgttccattggacagtactgctctatgtactactctacttctaatcaagtgccaaacttttaaaaagggaaggggatttttccccctctaggcttaaatatatctgatatctcataaacaagtcctgattttgagctaatccccaactcctcctgccaaatttcaatttaccgaagtacacaatgaggaagtgttgtgaaaattgatttttaaaagcaaaaatcactttatcacccaatgatttgctatactttttattgccataccctgtcttctagatataaaagacaaaaaaaaaaaaacaaggaaactatgtatataaaatactatacaaaaaagttgtattatcctatgttgttttcatgttgcaaaccagagaacacttccttattcagtaactttatttgtgtgttttaaggccaggtcagccatatctagcacaaaaaaatgttcccctttgggataacaacacttgacttttcctctgaatgctaagatatcaaagagatttttcaagcccaaggtctcaaaggaaacaaaaacaggcagcaccttcgtgtaagaggaaattcaccaagtgtttatcacaatactattctgtatgccaaatccttgagcaggaagctaaaatagcacttatttatttaacaaacatttactgaatacctatcacgtgctagttatccaacggtgagtaaaagcaagcacagactccaaagaactggaaattgctgggagcaatctgattctcggtctgtgccactctccttgatcaccaccaatgcaaaccaccttcgcctattccccacagtgctccaaagtttcaactgcttgtttttcttctcagaatctttcattaggaatcaatgttgttttgtttttttcccaggggaactacgtttctattttatcaatagttcccctgaaaataaacatccaaaagtctacaatctataaatgtggctcctatgaaggactcaaggtggagcactgttcactatatttagatgaaggtaggagtgaaagatggagaaggaaatggcaacccactccagtattcttgcctggagaatcccagagacagaggagcctagtgggctgccgtctgtggggtcgcatagagtcggacacgactgaagagacttagcagcagcagcagcagcaggagtgaaagaagaaaagaaaccaaacatactctgtggcctcaacagtattaacagtgctgtagagggtgctgtccatagatattgtaaagatccattattttaatgcataaggagttatttgtctactgaaatgtctaaaacatgaaattcaagcatcatatactttatctgtatgtaatttctgtataatttgcataaatataaaaaggttgcatcatctattctcaagcaagaaacttaagacaaatctaagggcttaagtttcttgaaacacagttcttttgacttctaattttctagaaaagctaaaaactgtgttattaccacttcttgggttgtcattagtatattttcttttgtgtattccttctcatctgaaaataaaaggtgatccaacttcctatctgaaagctaggacactgaataaattgctcaagaaatgcagcaagaaaatgaaagagctagaattcaaatgtaggtctctgtaactccaaagtccatactctttccatttatacatgatgaggctagatgatctttgatctactcgaaaaaccaaaattctatgcctgtgatttgaacaatttgtgacttataaataaaaatacctcataagtatgaaatatttctagtgtgtgaactaaattttagttctatgtttacttttcccctctacatttcatatcttctcccatatcagtttaaataaaaaatgactaacagaacgtatctccttagctttttaccaagatttgacaattatattctatattctaacatttctccatttttaaaagtcactttgggaaaggtactttgctttagcacactgaaattcccttttatccccccaggagttaactgatacttcaacataataaattcagattcagtcagttcagttcacttcagtcactcagtcgtgtccaactctttgtgaacccatgaatcacagcacgccaggcctccctgtccatcaccatctcccggagttcacccagactcgcgtccatcgagtcagtaatgccatccagccatctcatcctcggtcgtccctttctcctcctgcccccaatccctcccagcatcaaagtcttttccaatgagtcaactcttcacatgaggtggccaatgtactggagtttcagctttagcatcattccctccaaagaaatcccagggctgatctccttcagaatggactggttggatctccttgcagtccaagggactctcaagagtcttctccaacaccacagttcaaaagcatcaattctttggtgctcagccttcttcacagtccaactctcacatccatacatgaccactggaaaaaccatagcctttactagacggaccttagtcggcaaagtaatgtctctgcttttgaatatgctatctaggttggtcataacttttcttccaaggagtaagcatcttttaatttcatggctgcaatcaccatctgcagtgattttggagccccaaaaaataaagtctgacactgtttccatggtttctccatctgttttccatggagtgatgggaccggatgccatgatcttcattttctgaatgttgagctttaagccaacttcttcactctcctctttcactttcatcaagaggctttttagttcctcttcactttctgccataagggtgatgtcatctgcatatctgaggttattgatatttctcccggcaatcttgattccagcttgtgtttcttccagtccagcgtttctcatgatgtactctgcatataagttaaataagtagggtgacaatatacagccttggcgtactcctttttctatctggaaccagtctgttgttccatgtccagttctagctgttgcttcctggcctgcatacagatttctcaagaagcaggttaggtggtctggtatttccatctctttcagaattttccacagtttattgggatccacacagtcaaaggctttggcatagtcaataaagcagaaatagatgtttttctggaactctcttgcttttcccccatgctactaagccagtgggaaaatctttaaatggtttaaagcctattttctaacattttcataacaactcaatatagagggattcagaggttttgcaggagcttgaaaggatcctgtccttctacagagactaaattcagaaaagtaaaatgattcatcaataatcttgaatttctaatatgtctgattcttcttgcacatatattttgccaactaaatactatataaaatacacaataggaatcccatttatatcacatatgtctcaatataaattttattactgtttgctgaaaaaacaatatatatatattttaactgagtaacactctgatgtttcaataaaggatactgaaaattaaagtataagaggaaggcatcaagttctattgatatttatccaatttgaccaacctaaataaaagttacaacttaaaaattttaaatcaatgtacgaactagcaaaagacaattcttagagactaagacaacagcccaaaaccactctaaaaattcaaaggtcaaatgtttgaaaatgaaaaagatgtggagattttgttagtttaagttgtagtattgtttttctataaattgagtgttttgtccgaattttcattactaatataatttcattttcttcaaaaattatgtaactaatgaatgattattcattataaaaatttaaatacaaagaaaggaagtagtaaaagtccttctttacatgatttctctactgctagtttttaaccttggatttgatatgtctttgatccttggttcaactaaatcagaaacctatgcctgtttgaataactgattctacatcttcatggatggccatttattacctaagaatttatacaaggcaaaatgcctatattactctaatacagcatttgaaaaaaaagaaatgttcaatgcactgtcatcatttgccataccaaatgttaaagggaaaaagttccaaacagaaataaagatggatttctatatgctgacaggaaacaataagatgtatttgctaggtgaaaaaaagcaaggttagaacagtatgtatatagtatgcttccatttatatacaaaggagatacacacacatatatacacagttaacccttaaacaacaaggagatgggggtgagggcacccacctcatgtataactttacatttggccctccatatcctcagttccacaccctcagattcaaccaaccacagatcatgtagtactataacacatatttattgaaaaaatgtgtataagtggacccgtgcagttcaaacctaggttgttcagtcagcatatagatctacaaatgttattcatcttatattcagtctatttctaggagaattcatacataggaaactgataactggtttcttttgggaagcggattttactctggacatatgttacttttccaataattaaaaaaaaaatagttaatattaaggggagcaaggaatgtattgatccacaggatgaatttggtaactgctagcatctagattgttttttttttttttggccacactgtgcagcttgtgtgatctttgttccctggccagagattcaacccgggccctcagcagtgagtcctaaccactgaattgcaagggaattacctaagtggtcatttatttaaaggatagtctgttaggaaaatggactgcagcctttatctgagtaaaggaaaaagcacacaaaatgcagttaagtttcaaggacaaagtaatctgttaataaggcattaacctttagagccatttggtgcttatatctaattaaatttaattttacattaccactttcaaaaagaccaatctcagagaaagactttcacattatctacccattttattttccgtctgaacagaccactgtggcgattaaataaagcttcaagttaatctctttaaagtctacagtcttcgcagaacaagagtataacactcatttataaactttgcaatttaagatataatacccaaaatatatttaaatgctgaagctgcaagaggtataatcatattcattctacttatttcaaaattagagacttcttgactattcacttgccttgaatcctgttaattaaatctctaatctgttccactgtaacattttttaaataaaacaatcatactcagtttaacatcacaattatattaattcatatcagagttttattccaaatacaacaaacatctctttgactttaacatcaaaataatattaattcatatcagagttttattccaaatacaaagaacagctcctagacttagctgaaacaatgtcctcttcaaatctggtttctgaattgactacatattagtcttaattataatctcagaaactatgatccagaaaatttaaaccttaacagtctttgagaagtgaccaatatgtatgtgttaacatgttaagctgcattctgagtataaattatgttcggacaaggacaattttccatacagtgcctagaaagaggtgaattcaccttttgttgcccctgaaacataagcattatgagggaccttcattaaggaaaacagcacaaaactataaatgaaaaaacatctgtacaaatgcaaatattctaaatgagtatcaaaattacatgttataaagttttgaaacttaccaaataccataaaatccattaaagtaacttttttattaataatacctcctacacctgtataatattttctctttctacatgtttggctatatatgtactctgattgctgcttcatttaacagtgattttgtaaaatcattttatatatgattgtcaaatttaggaaaactatcaagtttctttcatatatgaacaataagatctctgggcatttcagaaaagtttacttgtgcagtgaactagttttaaatactctttgaattgataacactcatttatcacttttacactaggccctactcctttatgccatgaccctggtgtattggcatcacgggtggtaagaacattatcctaccagaacctgtagcacaaatttcattatacacagaagcaactaagaaccgtgtatgtacgtgcgtgcatgcgcatgtgcgcatgcatgctcagtcatgtccaactcttcacgaccccatggactgtaccctgcccagctcctctgtccatgaaattctccaggcaagaatactggagtgggtagccattcccttctccattcccttcttcctgacccagggatcgaacccgtgtctcttgcatctcctgtgtctcctgcattggcaggcagattctttaccaccagcaccacctgggaagcccctaacagccccttaaccccaaactaaacatattcccaattcaacctattaatcagaaccccaaaatgcctatggcacatccaatactacctacataaaagtgaagtctaaaagagctgggtcgaactggaagtacacaatggatttaaaggattgtggttaaattattttactttcacagaaaaagataaccatgggaacattgctacaattacttccaggccttagaaggggtagatgcaagtggcaggctctgaaacttaagcttaacgtcaccataaatctgtctctgggcctagaaaacaacacttagtaatatactttttaaaggaaggagaaaagaagaaggattactggtatactctgtatcatatgggcttctgactgtagaggcagagctggaaaaggcagaaaaagcatgtctatcttcatttttagcaaacaaattatgaatgtactctggaaactatatccttaagtatctgtcactaggatccatataaatcactgttgataacacaaagtgctttcatgttatacttctgctacttttcttgtacagcttaatccaatttaattgcatttttctgactttagataggccatgttaagcagtggtgaattctgggaagatgcagtaaacatagcagccttacatatgaggggggtacaataagtctctaggggaaaatttatacaggaatgtacttgcaaacgtcaaaagagaatctcatcctttagtgttacatagataactaggaaaagtttaataatctaaaacagtttgtcagaaagttgagggttttggaaaatgtattagttgtcatagacaataagaacctaagtaatttggagaaaaactatgtgaactagtttctagatggttaaaacagctttactgaaattagcacacaattagtaagacttagcttctattttgttcctcagttcagttcagtctctcagtcgtgtccgactctctgcgaacccaggaatcgcagcatgccaggcctccatatccatcaccaactcccagagttcacccaaactcatgtccattgagttggtgatgccatccagccatctcatcctctgtcgttcccttctcctcctgcccccaatccctcccagcatcagagtcttttccagtgagtcaactcttcacatgaggtggccaaagtattggagtttcagctttagcatcagtccttccaaagaacacccaggaccgatctcctttagaatggactggttagatctccttgcagtccaaaggactctcaagagtcttctccaacaccacagttcaaaagcatcaattctttggtgctcagctttctttatagtccaactctcacatccatacatgaccactggaaaaaccgtggctttgactagatggacctttgttggcaaagtaatgtctctgcttttcaatatgctgtataggctggtcataacttttcttccaaggagtaagcgtcttttaatttcatggctgcaatcaccatctgcagtgattttggagcccacaaaaataaagtctgacactgtttccactgtttccccatctatttcccatgaagtgatgggaccggatgccatgatcttcgttttctgaatgttgagctttaagccaactttttcactctcctctttcactttcctcaagaggctttttagttcctcttcactttctgccataagggattataagtatttgaggttactgatatttctcccggtaatcttgattccagcttctgcttcctccagcccagcgtttctcatgatgtactctgcatagaagttaaataagtagggtgacaatatacagccttgacgtactccttttcctatttggaaccagtctgttgttccatgtccagttctaactgttgcttcctgacctgcatagaggtttctcaacaggcaggtcaggtggtttggtattcccatctctttcagaattttccacagtttattgggatccacacagtcaaaggcattggcatagtcaataaagcagaaatagatgtttttctggaactctcttgcttttttcgatcatccagcagatgttggcaatttgatctctggttcctctgcctcttctaaaccagcttgaacatctggaagttcacggttcacgtattgcagaagcctggcttggagaatttggagcattattttactagcatgtgagatgagtgcaattgtgcagtagtttgagcattctttggcattgcctttctttgggattggaatgaaaactgaccttttccagtcctgtggccactgctgagttttccaaatttgctggcatattgagtgcagcactttcacagcatcatctttcaggatttgaaatagctcaactggaatgccatcacctccactagctttgttcgtagtgatgctttctaaggcccacttgacttcatattccaggatgtctggctcgaggtgagcgatcacaccatcgtgatcatcttggttgtgaagatgttttttgtacagttcttctgtgtattcttgccacctcttcttaatatcttctgcttctgttaggtccataccatttctgtcctttatcgagcccatctttgcatgaattgttcccttggtatctctaattttttttaagacatctctagtcttacccattctattgttttcctctatttctttgcattgatcgctgaggaaggctttcttatctctccttgctattctttagaactctgcattcagatgcttatatctttcctggcccctagcaccagccatttcagctcaagtggaaaagtttaactggtttcatttgaggataagtcaagtacatatgtcatacttattcactgaaattaaattattcatttttaagttttgggaccaaaggttgcagagctatttttgccacccctttttctaattaacaaattgcaaaaatatctgtctgatttttggacagttacaattagtgaaaaattgcaataatttttataaatttgagtattctgaatacaaacactttggtggaaacttgtagtagagttaataaaagttacctgtcatctctcagcttttccaacttggctctctctcaaaacaaattaaaggcagcaatgtccttagggcagggaggaggggaggaggcaatgaggaagcctctaagactgtagttatgccaaggtagatggtaaatggggcttcccaggtggcattagtggtaaagagcctgcctgccaatgcagaagatgtaagagacactggtttgattcttgggtcagaaagatcctctgaaggagggcatggcaacccactccagtgtccttgcctggagaatcagaggaaaccctacatttggagcatgtgaaagtgaaaacttcatatgtaagtattcacatggatacctacaggacagaaaactcaacagaaggcatattcactgtgtaaagaaagattttcctgccacaatcatcaacatagtctcatctgaccagagtgtgtagtttagtaagcaaatgagaaacactactttcttcccaaacaaatagtaaaatggatacagtttactttgtcctctctggccaagatgacatgggaaaaaacacgtagagtttcaggtatagaaaataactgtcaacatattggtaccacaacatgtggtgaaattttgtatcaaatttcatgaagaatcactatgtgctaattagccaattttttggtaataaaaacaagacaaactgaagttaatttgcttaagatcttatgagacgtatgaatcacagacaagaacactgtaaggacaagaaagcatgaatcctgtacttcactgcaaagctaaaatccatttgaaatctctgaggaaggggttaaaacttaatgtttagattcagattaaaagacagaactcccataagtatttgatctggagatacacaaaacattctggttccaatttaatgatttgaacacttaaaatatgtaatgagcttctgattattagaatccatcagattcctaattctaaatcctatagtaaatctgatgttcagttagataaacctccctttagaatatttacatctactctgggcagcatgtctaaaatttatcttttgcatatggatctgaagtaggcaaagaaaaacctttttaggactgatgcatgctgatcaaattccaaagttgcattaactttctgtcatcattgtaatgaatactgaataaaagaaaaattacagaaaacttccagtaaatagaaccataacaaataaaaacttgttttaatgatgctgaaaacctaaacaatatattaaaacaataagtacattatacaaatgaagacacaactcagttaaaagcacacattgcctcactaagccctggcaataaaactaaacatgctgaagagtcagcaatacacactatatttaagaaaaagcctccatatattaccatcagttcagttcagttcagttcagttcagtcgctcagttgtgtccgactctttgcgaccccaggaatcgcagcactccaggcctccctgtccatcaccaactcccggagttcacccagactcgcgtccatcgaatcagtgatgccatcaagccatctcatcttcggtcgtccccgtcttctcctgcccctaatccctcccagcatcagagacttttccaatgagtcaactctttgcatgaggtggccaaagtactggagtttcagcttcagcatcatcccttccaaagaaatcccagggttgatctccttcagaatggactggttggatctccttgcagtccaagggactctcaagagtcttctccaacaccacagttcaaaagcatcaattcttcggcactcagccttcttcacagtccaactctcacatccatacatgaccacaggaaaaaccatagccttgactagatggaccttaggcggcaaagcaatgtctctgcttttcaatatgctatctaggttggtcatgacttttcttccaaggagtaagcatcttttaatttcatggctgcaatcaccatctgcagtgattttggagcccacaaaaataaagtctgacactgtttccactgtttccccatctatttcccatggagtgatgggaccagatgccatgatctttgttttctgaatgttgagctttaagccgactttactttcatcaagaggctttttagttcctcttcactttctgccataagggtggtgtcatctgcatatccgaggttattgatatttctcccagcaatcttgattccagcttgtgtttcttccagtccagcgtttctcatgatgtactctgcaaataagttaaataagcagggagacaatatacagccttgacgtactccttttcctatttggaaccagtctgttgttccatgtccagttctgttgcttcctgacctgcatacagatttctcaagaggcaggttaggtggtctggtattcccatctctttcagaattttccacagtttattgtgatccacacagtcaaaggctttggcatagccaataaagcagaaatagatgtttttctggaactctcttgctttttccatgattcagcagatgttggcaatttgatctctggttcctctgccttttctaaaaccagcttgaacatcagcaagttcacggttcacatattgttgaagcctagcttggagaattttgagcattactttactagcatgtgagatgagtgcaatggtgcggtagtttcagcattctttgccattgcctttctttgggattggaatgaaaactgaccttttccagtcctgtggccactgctgagttttccaaatttgctggcatattgagtgcagcactttcacagcatcatctttcaggatttgaaatagctcaactggaatgccatcacctccactagctttgttcacagtgatgctttctaaggcccacttgacttcacattccaagatgcctggttcgagatgagtgatcacaccatcgtgattatccgggtcatgaagatcctttttgtacagttcttctgtgtattcttgccatctcttcttaatatcttctgcttctgttaagtccataccatttctgtcctttattgagcccatctttgcatgaaatgttcccttggtatctctcattttcttgaagagatctctagtctttcccattctgttgttttcctctgtttctttgcattgatcgctgaagaaggctttcttatctcttcttgctattctttggaactctgcattcagatgcttatatctttccttttctcctttgcttttcgcttcttttcttttcacagctatttgtaaggtctccccagacagccattttgcatttttgcatttcttttccatggggatggtcttgatccctgtcttctgtacaatgtcacgaacttcattccatagttcatcaggcactctatctatcagatctaggcccttaaatctatttctcacttccactgtataatcataagggatttgatttaggtcatacctgaatggtctagtggtttttctctgctttcttcaatttaagtctgaatttggtaataagtagttcatgatctgagccatagtcagctcctggtcttgtttttgttgactgtatagagcttctccatcttttgctgcagagaatataatcaattttatttcggtgttgaccatctggtgatgtaccattatcatagtacaaatccccaaacttctggcaaggagatattgttaatgtctttgggccctcagatataagttggagagaaataggagagaacaagtggggaaccaaactgaatgaagcatgggaaagagtgctgaaattatgctctgaacaatgctgagaatgctgaagagtgacaagaaaaaaggaagtggacagggggcaggaaaaaggcttgaaaatggcatggagatatactaggaatttccaatccattagtcagggctttcctggtgcctcagatggtaaagaatccttccacagtgtgggagacctgggttcgatccttgggttgggaagatccctgtaggagggcatgtcaacccatccagtattcttgcctggaacatccccatgaacagaggagcctggcatgctgcagtccatggggtcacaaagaattggacacgaccaagtgactaagcatagtcagggacctctaccttaaacaaagtacaacaggcaggaaggctcagaacaaatcttcaaaagcatcagcaaaatacattatcaaaatcaaatgatgctgtcatgaaaataaatagcaaggaattctgtgggtgacaggtacaagttgtacttctgtgtatgtttgaaacttttctttaaaagtattctttgaccaagttgggcttatcctgggagtgcatggctagtataacatttgaaaatcaatcaatgtaattcaccatattaacagccttaaagaagaaaaacaatatgatcacctctagatgcagaaaaaccacttgaaaaagttcaatatctattcatgattacaaataaaaggtctcagaaaaccaggaagaggaaagaatttccttaacctgatacagggcatctacaaaaccatacactaatataatacttaaagatgaaggacaatgttttcccccttaatcaggaacaagacacagatgttcactttcaacactcctattaaaaattgcaatggaagttctagacagaaaatgaataagagacatatacaatagaaaggaagaaataaaattatttttatgccctgatgatataattgcttatgtggaaaatctcaaagaatctacagggaagctaacagatttaatgacagtttagcaaagttcaagatacaaagtcaacatacaaaaaccaactgcatttccgtatgtttgtaatgaacaactgaaattgaaatttttttaaaacgtaccatttaaacatcatctaaaaacagaaaacacttaatataagtttaataaaatatatgcaggatctgtacaatgaaaactacagatccctgataaggaatacctaaataaatggagagttatatcatgtgcaaaggtgtgaatacttagtattattaagatgttaattctatccaaatagatagacagaatcaacacagtcacagtcaaactcccaggcggtatttttgtagaaacctatataatgattctaaaatttatgtgtacagggaaaaaaaatagaatagccaaaacaattctgaaaaataacaaagttgagaaattatactacttgattttaaggttcattacaaagctacaataatcaagattgtgtgatatttataggacagacacacagttcaatagatcagaacagagtatatagaaatatatccgtaagtatatggtaaattgagcttcaacaaaggtgcaaaggcaattcaatggagaaaaaattacctttcaacaaatagagctgcttagcaaactggacatccatatttaagacaattaacctcaactcatacttcataatgtatacagattaatttaaaatgtcatagatctaaaggtaaaatcttttagaagacacagttgtaaaatttttgtgatcttgggtaaggtcaagatttcttagcgataacaccaaaagcatggtccataaaaaactggataaattggaattcaacaaaagtaaaaactgctgctctgggaaagacatttttaaaagattaaaaagtcaacccacagactggggaaaaaaattggaagacacatatctaagagaagacatattcagaatatatagaaaacaatcaaaattgaataattacaaaacatgcagctaaaaatttcacaagaggtttgacagacatttcacaaagaaggtatacaaatgcctaagaagcacaaaaaaagatactcaatatcattatccattaagggaatgagaattgagataccactacatacccacgagaatgtctaaaactaaaaggactggtaatacaaagtgctgtagagaatgtgagaaaagtggaatcctcacacattgctgctgggaacataaaatagcatagccactatggtaaatcatttgccagtgtctcaaacatacactgaccacatgatagaacaaatccaatcctaggaatcagcctaagagaaattagaacttatgtccacacaaagacttggatgtaaacattcagaggatttttcataatcacaaaagaaagtgaaaacaatccaatgtctctcaatagatgagtgggtaaacaaactttggtacaatccacacaagagaataacgcctcagaaacaaaaaggaaagagccagtgatacatgcaacaacatggatgaatctcagatgcacaatgttaaatgaaagatgccagactcaaaaggctatatattatgtgattctatttatatggtagttttcaaaaattaaagctataggaacaataaataaatcagtgcttatgagggtctaaaagtaaaggggaatgatttcaaagtaggttacccactagatttagtaaatgaaaatataggacagacccagttaaattaaatttcaaacaaatgacaaataatctttagtgtaagtataactcatgcaatacaatggttcttaaattgtggtcccagaaccacagctttagttaagttcttagaccccattcagatctactactaaaacagaaactctgggcgttttatgttttaaagcaatctatgttttacaagccttacaggtgattctcatgctgtggtttgagaaacactgttcactatacccatcactggcaaaaaagaaccataagaagctaatatgaagagaaaggggcacatgagcctgtttgaaaatcaatttaccatcatcaaataataactaaagagccaaagggtatataatagaggttctctgagaagggacaattgcacttatctcacacgctagtaaagtaatgctcaaaattctccaagccaggcttcagcaatacgtgaactgtgaacttcctgatgttcaagctggtttcagaaaaggcagaggaaccagagatcaaattgccaacatccgctggatcatggaaaaagcaagagagttccagaaaaacatctgtttctgctttattggctatgccaacgcctttgactgtgtggatcacaataaactgtggaaaattctgaaagagatgggaataccagaccacctaacctgcctcttgaaaaatctgtatgcaggccaggaagcaacagttagtactggacatggaacaacagactggttccaaataggaaaaggagtatgtcaaggctgtatattgtcaccctgcttatttaacttctatgcagagtacatcatgagaaacgctggactggaagaaacacaagctggaatcaagactgccgggacaaatatcaataacctcagatatgcagatgacagaaagtgaagaggaactaaaaagcctcctggtgaaagcaaaagaggagagtgaaaaagttggcttaaaacgcaacattcagaaaacgaagatcatggcatccggtcccatcccttcatgggaaatagatggggaaacagtggaaacaatgtcagacaattcagaggatttttcataatcacaattttggggggctccaaaatcactgcagatggtgattgcagccatgaaattaaaagacgcttactccttggaagaaaagttatgagcaacctagaaagcatattcaaaagtagagacattgctttgctgactaaggtctgtctagtcaaggctatggtttttcctgtggtcatgtatggatgtgagagttggactgtgaagaaggctgagcaccgaagaattgatgcttttgaactgcggtgttggagaagactcttgagagtcccttggactgcaaggagatccaaccagtccattctgaaggagatcagccctgggatttctttggaaggaatgatgctgaagctgaaactccagtacttcggccacctcatgcgaagaattgactcattggaaaagactgatgctgggagggattgggggcaggagaaggggacgacagaggatgagatggcttgatggcatcactgattcgatggacgcgagtctgagtgaactccgggagttgatgatggacagagaggcctggtgtgctgtgattcatggggtcacaaatagtcggacacaactgagcgactgaactgaactgaactgagaagggactacaggagtgatcttcagccgagggcaatttcatccctagggaacactggcaatgtctggagacatttttggtcgtcacaagtggaaggagaggctactggcatctcatggttagaggccagggatgttgctaaacatccttcaaagcactctcctaagacaaagagttatccggcccaaaatgtcaacagtgctgaaactgagaaagttggacctcgtcaaaacatatttttaaccccaaaggctttaacatcaaagacacctttatgaacatggaaatagaaagattaaaaagacagtgacaaataaaatataattcaaggcatctcatgctaaaaatattagaattattctgaaaagaatttatatagagaataatgacacagagctaaaacatcaattttgtggtaggaagcaagttgatgatgaaaataccaggctgtttttttttctttggaagttatgtgacagaataaattggagatcacaagtttgagaaccatatgcaaactaaaacacatctgtaaacactgtatgaccagaaaacattccggcccaggaatcatggaacttgagttctagttttatttggtattaggtagctgtgtaatttagcacaaatcactttcttatctgggcttcagtctgtccatgtgtaaaatgagggggttagactacttaagtcatatctaagaccccttgcagctttaacacactatgtctatgtcaaaaaaaaaacaagcacaagaaacattcaaagacattttttacaggatatagggggcatggtatcattttgtttcctttggggtagtcctgtgttgactttgctacttttggcttttgtgtttaaaaggtgttaaacaaagcttgctgctgctgctaagtcgcttcagttgtgtccgactactagcgaccccatggactgcagcctaccaggctcctccatccatgggattttccaggcaagagtactggagtgggttgtaaacaaagcttagcttttcttatttatgtataataattataataacaattcatgttcactacagagaaactagaatatatgataaatcactctttttcactaagtaggattctgagatgaattacagcaggaatgtgttaagatagtctaacaaaagtctattttagttttgcaattaaaaactaaagtgaaaatgtttagaaaattagttatactttgtatgcacgttcttagggaagactacattattattaacatactaactgtcatgatataaaagagaaagaaaccccataatccttcctttgagaaaatgtattttagttcaatatgacatcaacagtaataaaaaatactgttgttgttgttcagtcaataagtcttgtctgactctgcacaccaggattcactgtctttcactatcttccagagtttgttcaaactcatgtcagcacctatacttataaaatataaactgatacaaccataacatcaagactcaatgttcagatgtttttaaattttaaaaatatataatttattattgtctttaacaagaaaataagttaatgggccaaagaaaacttactcagcttcaaggtttgaagtatgacagtctttgtgtcatacatgttagtgtttctgcatcaatttcagtgttagaagtataatttcccagaagaattccagtcaacagtactgatttccaaagagtaacttactttaatatgatgtacaccattcagttttccaatctgctgttcaatggtccaaacacaggaactacatgtcattccttcaacagagatggtgacagaattcacactcatactcagatccattttgatttcttctttacattcctattagaaacaataaacttattaatatcagtcatggaaataacccttcctcttacatgtaccccagtgttcactgcagtgctgtttacaatagccaagacatggaaataacctaaatattcaccaacagatgaatggataaagatgtggtacatacagtggaatattacttggccataaaaaagaatgaaccatgccatttgcagcaacatggatggacccagagattatcatacaaagtgaaataagtcagacagagaaagacaaatatcatataatttatatgtggcatctaaaaaaatgatacaaatgaacttatttacaaagccagaagcagactcacagacttagagaaggaacttatggttttgtgggggaaggtgggaagcagggatagattgggaatttgggattgtcacatatacactaccatatttaaaatagataaccaatagggacctattgtatagcacagggagcgtctgtaataacctaaacgggaaaagaatttgaaaaagaatagatacatgtatatgtataactcaatcacttagctatacacctgaaactaacacaaaattgctaatcaagtatgctctaatatagaataaaaacttaaaaaacaaaaaacaacaaaaactttaagttaaaagaaaaaagaatccttcaacattcccacctgcccaactgaaaatacactactaatataattcggttagcattcttttctctcaccttattttactcccatcccagcacttttaggtcatctattcccttgatttagtgctttcttctcttagatatctgcttagctaacttcttcatctctttcaagtctttactcaaatctaatcttcctaacaagtcttacactgaccaccttgttgaaaattgcaacctacatcccttccacacacacatatactctgattgcccttatttctgccctctttttttattttcatagaacttaaaaccttctaataagctccattaatttacttgctatgtttattgcttattatctgtcttcctgttgttttaaaatgtgttcatgaattctttgtcactccttcattcaagagatcaaatttaacaactccttcgttcaagagatcaaatttgatcaagagatcaaatcgagtgtggcctcaattcagtgacttgcttccaaatcactagtggaagtgacaatgtgtgatttccaagataaaaggcactgcatttgggggggaaagtcactgtggcttgctccttatcctctcttcaatcaccccatctaggggaagccacctgctatgtcatgggacactcaagcagcattatggagaggctgacatggtgagaaattgaggcctacaatcaataaccagcaaagacataaggtctcctgccaataaacaggtgagtgaactgtcttgaacgctgattcttcagactcagttaagtctttagatgcctgcagcctcagctgacatatagacttacaacctcatgagagatcttaggccagaacctcccatctataccactccccaattcatgacccacagaaactgtgagacaataattgttggtttttttaagccactaaattttggaataatatgttatactgtaataaactcctcattaaaatgaaaattctatgaaggcaggagtctttttttttccattgataattagtttgaatcacatgaaatttccattttattgatataattgatatataacatcatattagttttaaatgtacaatgatttgatatgtgtatatattgcaaaactaccaccaaaagttaacacccatcaccacacatagttacaattttttcctgtgatgagaacttttaaggtctactatcttagtgaccttcaaatatacaatagaatattgctaactatagtcaccatgctgtacattgtatccttgggacttatttatcttatagctaggaatttacatcttttaaccatcttcatccatttttcccactccccaccccctacctctggtaaccaacccatcaatctgttctctgtgtctatgagttcaggttttttcagattccacatataagtgagttcatacaatatttgtctttctctatctgactttttcacttagcataatgccctcaaggtccattcatgttatcacaagtggcaggattttcttcatttttatggctgaataatatgcatatgtatatcacattttctttatctattcatccacagacggacattggttgtttcaacgtgttgactgttgcaaataatgctacaatgaatatgggggtgcagatatctttgagatggtgattttatttcccttggataaatacccaggagttagtagatcatatgatagttctgcttattaattttttagaacatctatactgttttccatatctattttttaaatgtaaaaatcttcacaaagctgaaagaaaaattcaacactagctgcatctttctcagtcttaatttcaactaacactaattatggaactgtactttatagtttgatttgatctgaaatagactatttttgttatttacttttagagccaaagttattccaaatgcaacacgtaacaattcagttatgtccactaattcttatgaaattagtattatcaatttttacatagattataatatccattcaatataaaagaatatagtttatctaacttttgtttttaatgacttgaaacagcctttattcaaagtaaaaagaaacaacaatctctaatgaaccacactgccagtgatagtcacattctggtaatttatgacttataatctatatgtaaaaataagctgtcatcactctgagaaacttcatcatccttcctctagcatgagcagctgctgtcaacaggacaaaatctgaatctttgaatgaatggtaagtagaatagggaagaagcagtagaaatgagggcttccctggtggctcagtggtaaagaacccgcctgccaaagcagaagacgtgggtttgatccctgggtcaggaagatgccctgaagaaggaaatggcaacccattacagtattcttacctgggaaagcccatggacagaggagcctggcgagttacagtccacgaggtcacaaaagagttggacacaacttagcgactaaacaacagtagaaatttagaggagctagaactagttactccagctcaagaagttcttcatgctgtctgaattctccattgcatgaaatttacaatttaaatattattctattaatgaatagcttccctgttttccaaatctttattatgaaaaatttcaactacgcataaaagctgaaatagtacaatgaacatctatctgtatatcctctaatgaattcaacaactgctaacattttgctgtatttgctttatttttctaatctaagttttagagatcataatacttcagcatgcatttccaaagaattaagaactgctgcataaccgcaatactatgatcacagctaagaaaattaatcggaggcggtcctaagatggtggaggaataggacggggagaccactttctcccccacaaattcatcaaaagaacatttaaacactgagtaaattccacaaaacaacttctgaatgctggcagaggacatcaggctggtcagaatggctactatccaaaaatctacaaacaataaatgctggagagggtgtggagaaaaggaaaccctcttacactcttggtgggaatgcaaactagtacagccactatggagaacggtgtggagattccttaaaaaactggaaatagaactgccatatgacccagcaattccactactgggaatacacaccaaggaaaccagagttaaaagagacacgtgtgccccagtgttcatcgcagcactgtttataatagccaggacatggaaacaacctcgatgtccatcagcagatgaatggataagaaagctgtggtacatattcacaatggagtattactcagccgttaaaaagaatacatttgaatcagttctgatgagatggatgaaactggagccaattatacagagtgaagtaagccagaaagaaaaataccaatacagtatactaacacatatatatggaatttagaaagatggcaatgatgaccctgtatgcaggacagcaaaaaagacacagatgtgtatagcggacttttggactcagtaggagagggagagggtgagatgatttgggagaatggcattgaaacatgtataatatcatgtaagaatcgaattgccagtctatgtctgatgcaggatatggcacgcttggggctggtacgcggggatgacccagagagatgttgtggggaggggggtgtgagggggattcatgtttgggaacgcatgtacacccgtggtggattcatgtcaatgtatgccaaaaccaatacagaattgtaaagtaaaaaaaaaataaaataaaataaaatacaaactcctctttgagagttctagacactgaaaactggaattacatctcctaaaaactaggtaagatcagttacaataaaacagaagcccaaatggaacaggaaaggcaggtaattgtgaacaaagaattcttgggatatagggaattcataggcccaggttaaaagtctaaggtggggtacttaaggcaagcatgaaggctttagggctaccactagggagagggtcactggaagcacaaatatacatgaaaaggtaagtagaataatgtctaaaacaaacagattttatcaaaattttgcctaccattagtcttgtccttaaaaaagaatacacttcctcttgtagcacatggctgcttgcctctaggtcaaaacattcacacttagtaccgatatggctcagatatgttatgggtcaaaatagagcttttcagggctcatccaggtacattatcaaaactgactaaattgttttataagaaactgtcaagttcaaaaaacagaatcggtaacaaacttttggaatacaatatactcagcttatgaaggctagtttacctggttagttaggaatgtaaaactgaaatacagttttattttgggccatgtccaaggccaaagaggagctgatagagactagttaagcagcaaagcactttttaaagtgactggattatttaccctggaaatgtgtgtgtgtgtgtgtgtgtgtgtgtgtgtgtgtgtgtgttagtcactcagtcgtgtccaactctttgcgaccctgtggacttttccccgccaggctcctctgtccatgggattctc

SEQ ID NO: 153 - DNA, 198569 bp, Hippotragus leucophaeus
  source 1..198569: mol_type = genomic DNA
ataatgccacagttattccacatacctctcaaggctgagtctaaacttgaaaaaaaatattttgtagtttatgagctggagatttttcttcttttgctactcctctagcgttcccctggagaaggaaatggcaacccactccagtattcttgcctggagaatcccatggacggaggagcctggtgggctacagtccacaggtcgcgaagagtcggacacgactgagcgacttcacttcacttcactagcgtttcccagcactgacttttctcttttccttttctaaggccccaggatatacggataaacccccccagtccacacctggagcttccctgcccgccccgcccccacccctctctgtcagggttttcaaataaaaccaaactacaggcagataatgctttacatcctaagtccacagacgaaggtcaggtaatccatttcaacgcttcctttaggatttatgactctccccaaagtctttcagaaatctcactttaagcggcgcacacaggctggcggcccagcgcacaagggccgcgcgtgtctcgggcgcggctcccaagcctcgcccgccgcctcggtttcctccgcccgggacgatgcctaccacccgctccgtttccgccagcgacggcgccgcgcacacgggcacacgggcacccgggcacacgggccgcggcgccgcgcacacgggcacccgggcacacgggccgcggcgccccgcacacgggcacacgggccgcggagccgggcacacgggccgcgcacacgggcacacgggccgcgcacacgggcacacgggcatacgggccgcggcgccgcgcacacgggcacacgggcacacgggccgcggcgccgcgcacacgggcacccgggcacacgggccgcggcgccgcgcacacgggccgcggcgccgcgcacacgggcacacgggccgcgcacacgggcacacgggcatacgggccgcggcgccgcgcacacgggcacacgggcacacgggccgcggcgccgcgcacacgggcacacgggccgcgcacacgggcacacgggccgcgcacacgggcacacgggcacacgggccgcggagccgggcacacgggccgcgcacacgggcacacgggccgcgcacacgggcacacgggccgcggcgccgcgcacacgggcacacgggcacacgggccgcggcgccgcgcacacgggcacacgggccgcggcgccgcgcacacgggcacacgggcacacgggccgcgcacacgggcacacgggccgcggcgccgcgcacacgggcacacgggcacacgggccgcgcacacgggcacacgggccgcggcgccgcgcacacgggcacacgggcacacgggccgcgcacacgggcacacgggccgcggcgccgcgcacacgggcacacgggcacacgggccgcgcgtgtctctggggcggcccgcggccctcgcctgtttcctccagacgcgcccgcagagcctcagccccgctccgcctgctcggggcccaggcctccggccttctctcccggccgcccgcggacacacggcccgtttcagggctgggcgccaggacgcggcctcaggccagccgaggcggagaagccggcgctcggggcgcctggtgccggagacgccaccgaacacgcccgcgtcctcgcggtcccgaggattccgcttcccacgcagacagagccaggccaggatttggagggggagcgaatccaaaataggcgaagaagcacatgaggacttaaggtactggacgatattgtgtgaactgctaaaatgcttctcggcacaatcggcagcttaaaaaaatactttcctctggtttaagggcattttcccgtcacggtcctttggggtggaggtcttggcaaatacgaagtccaaacagaccaaaagctcaaacgtttttggtccagtcaagtgggacagacagtaaacagaacttacatgtatcgtagagtgtattggagaggtgtataagtgctaacgggaaaaataaaagggcaaaagcagtagaagtactggaggctttgcaggtttagctgcatggacattcgtgctagttgaagctgccgattgtttcttcttccaacccggtgtggaccataggcgcagtgccccttcttcaggccaggaaggcaggcctcccctcccagcaccttccctctaagaacacaacctccaggcaacacccccccgcaaaaaaaaagcagatgaacgccttctgcctaacctccaacagccagaaacccggcttctggaacagtcagacccttttatcactttgtttgcttttcagctggttgagtcactccagccaacagtatggaacaaaaaactgtttacaggcacaagagagccaggtagagccatccaggtggggcttagtaatttgtggtggggtttccaaagacaggagattcaacaggattgtgttaaataaataaatcttatttttcttaataatgtaaaaaataaattgcattttcctttggcagtaagtagctgattcaacgttgagcctgaaagctgtttgtgttgttgttggttggttgattggttgttttttttttttttttctttttaagagactacagcttcgcttcagcggtgcatcagtgacaatgcatattatttctactgctttcatgaaccttttgcatatttgtttgtggcaggcctgtggacttcacttatggcccagataggcacccagggtgatgcaagcgcccaccagggccagactgagcagtgccttcagagacagccaggagaaatcaaacaggggccgcatactagggccatacagctccacaaaggcgtcctgcagagggggagagggcgggagaaaaagagtgttagagtataaatatttcctgttactgtaacaaaaaaagtgccagtgcagtgccggccgacagggggagaggcgtctgaagtgccttgcaccttcagaagggtgagggcaacggtcagatgtgctttggggataatgatttcagacccactcttttcactttcattcaggaaatacttattgagactgtacacacataccaggcccagcagagatacagccatgagtgaaacagaccaaaagctcaaacggtttgatccagtgaaatgggacagacagtaaacagaacttacgtgtattgtagagtgtattagagagcagtaagtgctaacgggaaaaataaaagagcaagagcaatagaaatactggaggctttgcagttttagctagcatggacattcgtaaaaataattttaaaaaaaccctaactactcctttactgaatgcttgctataggccaggcacttgtaacgaatccctgacatgcattattttctttattcttcatacccatcttaaagagtcctttactttgttcttgtgctgtaagaaagaagctgagaccattggtgctcatttcttagatttgttggggaagattggattccgggtctgggcccagtgagcatctggacaactctatctgagtatgttggcttcccaggtgacccagctgggtaaagagcatgcctgcggtgctggagacgcaggcagatgcgagacccgtcctcaggtgggaaggtcccctggaggagggcatggcgccccactccagcattcttgcctgggaaaaatcccatgggcagaggagcctgctggtctgcagccttttgggtcacagagagtcggactggcctgaagcaacggagcgtgcgtgcacatcagtgtataaagcagtgagtgaagtgtttttcccttggtggattaatcaggtatgaaggggaaaacaagatacagttccagttagccccctaaacctggaattagcacacagcttcactaagggtgacggagcatacagaggtccagcctcactgtgtgagaagcgtctgatgacgctgaccatgcttttgtctgtctggggcgtgcattgctgtggagggatcaggtattatttctgtctccccggtgctgtgcgtggtcttagtacatgtaggtgtttgagaaatgtttgttcagttaatgattaaggttttctaacatcaaacattggtttgaattctgcatttcgcctaatacattacccagatactctgcccatttgaagttattccttttacatacaaccacctctggaaatcttggcagtaattgcaaaggtgaacatttacggcatcattaaggggaacttcctgtgttattaaatataaatgtgcacaattatttttcatgactgcataatattccaccatgtatatttatttatctgtatctatgctgtactttatttaaccaattctttttattttttaattaaattatttttgattggagggtaattgctttacaacatagtactgatttccgctaaacaacgtacaactgctcaactattcccgctctctgagcccctctctcctccccatcccgcccctctaggtcatcagagagtgccaggctgggctccctctgttacagagcagcgctgtgtaaattcttacctatgcatttggatttaggttttgtttttgttttttgttttgagacaaattcccagagttgaactcagttgatcaaaattgcttcccacagtcctgaagggtttgtgctgagctctcctcactctctcactgccccagtgaccttggcaccttttacaaaaagcagacaagagggaattccctggcagtccagtggttaagactctgcactttgactgccgagagtatgggttcagtccctggttgtggaacttaagataccacaagctgtgcagccagaaaaacatgaaaacaagaactaaacagacagaaccccacaaaggcagacaagggttagggcggtgcgtctcgctgggggtggtcctgccccccccatgacacgtctttggtagtcgggtctgtctgggggagggggtgctgctggcatccgatggcagagaccaggggtgccctccagtgccccacgcaggaccggacggccccagcatgagaatcatcccccgcaagtgccagtggtgctgagactgagaagccttgtgaagaaaggttcagaagaaactccataatcacagccctcagaagacccagatggtcgatctggtgtgtccatagctttggtcaaattagcgccagatgagttagctagcctggacaagtagctgctcccttactcgtgggtgacctctaccttcggaggtactggattaacttctaccaggagagggcgcaagggttttcttcttccttaatctattgttaaacagttttctgagtttgagtcttagcagagcaaggcaatagacataaatgacacacttgcttagtgcccttggcccagagctgagctgacgatcacaactgtttgtcaggacaccgaccttccctacatgtcgggggataaacggggcaggaaggagtcaggaccaatacagagaaacttgccttttgcagagtgcacccccggaccccacagacacagcagcagacgtctaacagccctcccctccgtgctgttttctctaacgacgggaaggctggaacccccatacaccagccaaaggcatcccaactcctcagaagagcacactgggtggtaggcacttcagcttaatgtcgggagggtcggcggctgggccctgcgtccgtttagttatcaatggagttgtctgtggcgggatatggaagagactaaggcctcagccacctgacccttccagaccaggcgcccccctcgggagacaggggaagcagggagactagggccgctctgcctggtgacatcccccccccccccccgccccgggcagatgagacgcctctcccagcaccccacccctagggccggaagacctccctcagccacttgtataaatatctgtgcttcacggcccatttctgatgtgcattacaaagaaagcaatcatttctgaagtgggatgagctaacagcatctcttaacccaaagcatgggcacggagggatctgggaacgagccctgagctcaagggaggaggtctgcgtggaatcccagctttgacattttattgcctgtgaccttgaacaaattacccgaggctgagcgtcatttatctcacccataaaactggttgttgtgaagataaacgtaggtgactcgggccatttgtaaacgtggccccgagcgagaactagaggaaacatcaccctgttctctggtctgccctcttgctaacctgctgtgatcctccttaaactgccctggcctccaggcagtctgctgagcctgcttatttccagaaacaagcgaccagctccctctaaggtgtcagctcttggttctcaagatagttgatgatttctaaagaaatcgtgaattcagacgtacacacatgatgtgttctggtggaaaattggaagcgataacacacgcccagctctacttcctcatagattattaagtcaggctgtagggctgagagacatcatttaacgcgcgaccccccccccccggcccctgagatggaatctaccccataatctgcccatctatgattctaaagtgcggagcagagcctgtggtttcaggagtgaagctccaaaagctgttttcacgggggagtctccttgctttttcaaacgtcctgatcagggtgatttccgaaggctgtttgaacagtctgtcattatttgtttaagtctgaaagctgttttaaataaacacatgctcattctatgcattaaaagcaacagagagggaagaagaaagcctgggccctcgtcacgtgatttggacaaaacccccgcctatatgttcagggtgcatgcagcccctggttgtgtcgggactggccagggctctgcccgacctcaaggatgggcacggcaggtctccaggggagggccctttctccttctgttagcccccaacttcagaggggaggcaggcagcgccccagctctggaggcccttttgcagacagcttccccacagacttcacattcagaggccacagatggctggagtctgagttccagcagcgccgacctccgaggagcagggcagctaatgccccatgcccaggccctggctgcagggctgggagtcggccagggagatgtggacggaccgggtaggaacagacagctcaagtcagcgaaggtgggaggagggggtcagagcgtcctctccctgcgctgggaccactcagccccatccctcctgcccccgtccccgccacacctccctccaggcagcccactctccacacctccctccaggcagcccactctccacacctccctccaggcagcccactctccacacctccctccaggcagcccactctccacacctccctccaggcagcccactcgccaggattttcctttccccttcaggtccttcaaaaagtttcatttaaacctggttccgaataaaaggagatctaaaaaccaatgaatcagaatggcaagaactgaagaccactgagttccactgaacaggatggtgtgggggtgggggcaggagcccagataccctcacacaactcaggggctctcaggagcagtaagcagagaggccgttcatgtttggaaatgcgcaacagaagctttaaaaatacagttcatgtgttagtgattccacttctaattatcttgaaaacaattaataaaactttaaagcaaaaatatctgaaaatatgataacgatatgttatcgtgtagtcactcagttgtgtctgactctttgtgaccccgtggactgtagcccgccgggttcccctgtccatgggattgcccaggcaagaacactggagtgggctgccattcccttctccagcggatcctcctgatccagggatcgaacccgcacctcctgtgttggcaggtgggttctctgccactgaggcaccagggatgcccagtggaatgtgggtcagtcactaaaaatcgtgccctgtacttactggcaaggaaagatgcccccagcataacactgagcgaagccgcgcagcagcctctgccagtccaggctccctgatggctcttagcactcacagggaaatggggaggtgaccttggtcggctataaacagatgggaaactcaggtccgttccggtctttgggctgactgtggatgccttctatgatcatggaagagcctaagtggggaagccatcctgcccttaagcagatcctggcctagagaatggactcgtgtgcgtccacatgcgtgtgaaactcagctagatggaggcctgccgccgtttctgctctgcacggagcagaagcaaggagaaagtcagatggcgctaagaggaagccagacgctgccatcagacggctccgatattttctgttacccgaggctttatcattttatctccacggggattgcctcccacgtgaccacctgagggccagtgcagagcacgcaccttccgtcattccaccatgtggctagggagctggggtgtttatacaccgactcctcccacttgctgggtgagggttgctcctatggaggcatccatagtccagcacttctggctggtcatgtgcacaggcaaaggggtcagagaaagccactggggaaagaggtccagatgctacatctcctgtagcttgagcgctctgaggtggtaagggcaagacgaattccacagggcaggatatgagccgctgatctgaccccctcactgtttctctagcctcattaccttctctccccaggaccagtgttaggatttcccacctaacttctctgccgttagcctagtgccctacccttcaatcttctctgcctgctgcagccacagggatccgttcagaatcccatctgtcactcctgtgcttcgacccagaccctttaacacgcaagctccccgtgctctccccacccagcttcctgctcagctctcgtcactcgataagttcatccagttcccgcaggaattcggtgcaatggtgttctgcaggcaactttctccatgtccctgggctgagctaaataatcctcagccagtccctgctcactgtattctctgaaggtcatctgtttacatgtctgtctccccctcattcagctattagcacctggaggtgcagggaccatgctttatttatccttggatccctggagcatgtttctgccacatgtcaggcactcagcatatgcttgtggaactgaaatacaccttactgtagaccaggctttccaaacacattttaatagatgatgtttttcaaaaggagcatatacaaaggacaaataaattttgcactggaacaaaatcagatgcctttttttttttttttttgctgcagcagcttctagtgtctccagtgaagaactcaagttcaggtcattcagaacggtcagcgctggatctgactggtcggtgttcgtgccacgttggcggtggcactgtgctattcagcagttttgaatagtatcccacctgaatgccctggagtctccaagggaggtacaagctgtggggcattttccaagcccgctgaaccatctatccctctgtcagggagatccctgtctcgtgaagactgagaatgcggagtggaggtaacaaagcagtaattctgcacacgatgagagaggcagcgctggtgccccctgtacggctccggtattttctgttacccgatgctttatcattttatctccacggggattgcctcccacgtgaccacctgagggccagtgcagagcacgcaccttccgtcattccagggcagggcaggcgatcagaggcaccgaggcaactctagaccttcacgggagcagcaaggccgctggcggccccttgtcttggaatctgctaagaggtatgagtgtgtgtgcgcacactcacttgctcagtagcgtctgactctttttcgaccccatggactgcaggctcctctgtccatggggttttctccaggcaaggatcctggagtgggttgccattacctcctccaggggatcttcctgacggaggatcggacccacgtctcctgccttggcaggtgggtgcttcaccactagcaccaccgcagaagcaagggggacgcgcgttgttcccaataaacgggacccgcggtttcccctgtgcccagaggcagctgacgtccaagccccaggcgagcaggaatgctgggaaaaagaaggaagccaggcagggagggagacacctgcacagcagagggcagggctctgcctgaagctgggaggcagcgatgcccggacgcctactagggctgagatcaaagggggcgcggcggcctgcgcagcacacgcgagggagccagggctgtgtctacctgaacgcagcagctggtgaggaagtgactccacttcccgccttatcattggcccggcaggatttcctctgcagccactttgtgctgaatgagtctggaaggttccgtctggagcagagagccgtggtgggcggtggctaactccagtcccctgggagcttcctccccccacccccaccccccgcccctttactcctgaagtattgattccgggcttgggggaaaaggaaacagaaaaaaccttgacgactggagcatataaccgaaggacacacagctgcctggcctgcagatgggggcccgcgagtgtgagaggccgtgggacccttcaccgaggtcctcggggcccaccagccccgcagtaaagggggctccaccttggaggcactctgggcccagggggaggagctcgttgcgtcacaggccgaggacataaaaatgaaacctaatccaagtgtcatctgggtgtaaccagaaacctgctcgagaacgatggcaggagatgagaagcccacacaggactggcccgcccgcctgcctcgggtccagggaagattgggtgtattttgtgatgcaaattgagctgaggatgcaaatcaggcaggggcccggaggagagagggcagaaaaatgagaaccccaagggttccttcccttcgagagcagggcagagtttgaacctcatttgcaagtctattgctctggggaccccacagccacggggccagctcaaaggcagtgggccctgtccacgtgctggaggccggaaccagaggctgcctgcccggtgggacctcagaggttctgctggtctcactgctctggggctgggtagtcgctgccgtctggagagaagtgtggtgaggaatcccaggctgtactagctgtgtaaatactgcaggagtggggacttggccccctgtgggcttaggaagtgagaacagtccagagattcaaaaggtgtctgtggaaatgggccaagcaatgcgtctatagcaaaatgtgctttaaaaaaatgttaaataatcgtaccgtttggttcatcaggttcagataaaccaacgtgagactaaagccatatctgtagaagaccctgaaatctcatctttgacttgctgattcatttgggaaccaggcattttttataaggtgctgaggagtcttaaagttaaataagacacaggcctgcattataagaatggctccttgatattctcatgcgttcacagcagctttggtgagcaggagagttctataaatgcatgcaaaaaagctgtgtgtgtgtgtgtgtgtcattttgtgtgtgtgtgtgtgcattttgtgtgtgtgtgtgcattttgtgtgtgtgtgtgtgcattttgggtgtgtgtgtgtgcattttgtgtgtgtgtgtgtgtgcattttgtgtgtgtgtgtattttgtgtgtgtgtgtgcattttgtgtgtgtgtgtgcattttgtgtgtgtgtgtgtgcattttgtgtgtgtgcattttgtgtgtgtgtgtgtgtgtgtgcattttgtgtgtgtgtgtgcattttgtgtgtgtgtgtgtgcattgtgtgtgtgtgtgtgcattttgtgtgtgtgtgtgtgcattgtgtgtgtgtgtgcattttgtgtgtgtgtgtgtgcattttgggtgtgtgtgtgtgtgcattttggggcttcccaggtgcctcagtattaaaaagaattttctgccagtgtaggagatgcaggttcgatccctgggtcgggaaggtcccctggagaaggaaatggcaacccactccagtattcttgcctgggaaatcccacagacggaggagcttggcgggctgcagtccatggggttgcagagtcggacacaaccgagcgagtaaacaacaaaggcatttgcccttcgggctctggggtttgaggaaggagaccacggctgctgtcctccttcagggggtggctcccccaggaccctttaggcccagaggccgcaggaaactgcctcgcagggttttggctttaaaacaaagtgacttcatttttcttcctgaccttcctcattccactaccttcttttggcgagagagccgtgcattttctggcacttggtcctttcttgctctgggcttatgttattttcactgttagggggaaacatcccattatgatggaatttggttggaatgaaagcacatcaagcaaaaaatagtgtaattattacaactcaacaataaaaagacagatagcccaattaaagactgggcagagatttgaatagatatttcacagaagaggatctccaaatggtctagaagctcatcagtcatttagggaaatgcaaatggaaaccacaatgagatatcccttcatgccgaccagcatggctttcacctcaaaagtggacaataaccagcaccgaccaggaaggagagaaagcggagactgcacacatcactcgtgggaaagaagagagcgcagcctctgtggagaagagtggggcttcctcaggggggtgagcggttaccccacgacccggcaattctcctcctagatgcacacccaaggtaactgagaatacatgttcacacagaaacgtgaacacacattcacatcagtgtgatttataatagcccaaagtggaagtgacccaaatgtctagcagctaatagataagcagtagggtgccatccggagaaggaagtggcaacccactccagggttcttgcctggagaatcccagggacgggagagcctggtgggctgccgtctatggggtcgcacagagttggacacgactgaagcgactcagcagcagcagcagggtaccatccacaccatggaatattacgccgccatagaaagggatgaagcattgataggagccgcaacgtggatgcaccttgaaaacggcacgctggatgaaagacgccaggcatgaaggtcacacattgcgtgccgccatgggcctccctggcggctcagatgggaaagtctgcctgaggtgggggagacccgggctcaggaagatctcctggagaaggaaatggcaacccacccggaactcttgcctagaaaatcccatggacggaggagcctggtgggttacagtccatgtggttgcaaagtcggagacgactgagcaacttcactttcatttctatgacatgtccaaattagacaaatccgtcgggacaggagtggattggggctgaggagagacgagtggacagagactgctaacgggcacaggcctttttttttttttgccagagtgataaacagttctagaatcagagaacagtgatgggtctcaagacattagaaatactaaaaccaagcagtcacgcttccctcatggtccagtggcttcccacgggtccagtgctttgcaatagaggggacattggtgtgacccctggtcgggggagatcccacatgccactgggcagcaaagcccgtgcaccgcaactgccgcgtctaaataccgagccgggcggcctcgagcgcgcgctgcgcagcaggaggagccgcagagcggccggcgccgcaactggagagcagcccgcaggcagcggccacgacccagcacaccggaaacaaacattttttaaaagtcacttagaattgaatttcgaagtttgtcaattattatttaaaatcgtattttttgcacgacgtgaagaagggcactatttttatgccgcacggaattggacagaaggagctgcttgttctggagcccttgctcacaggggtggccccctcgccagggtccagacctgcccggatgtgagcgtggccttcactcggtgcggccggcagcagggagacgcgcccccgccccggagagcccgctctgggctgcgccagccacgtggcccgtgaacgcggggtccggcccgccgaggaacccagggccctccctgccgccccagagcgagttcataggctggagatgggaactgcgcggatgctcgccgagccccgcagcgcggcctgagtgctgtcatcgggacaccagacaggggcgggggtgcgcggggccctgatttcccagacccgagtcgagggccgcaggcctgactctccgctggtttaagtcagcaggtgttgactgagggtggtgtggggggagagcagagaagcgcattcctaacaggaacttgctgaaagcggcctgggacctggagggcgtgtgtccaggggcggagcaggaaggggcgccggcctcggcggcccgccagcctccgggcggacctgcgctgacacctgctttcaggactggctgagaaaccagcacggcatctcttctggaagctccgcaccacgccgggcccgggccttccctccacgacaggctcaggaccccgtctgccgcccccgcgctcgaggccgccgatcctgggtcctcagtccgcggcaagcgagtcgctattaacagccctgctttacctcccaggacgctcgcatcctgcagggaagcaccccgggacacaataggccgtaccctgtgccagcggcccagtgagtcactgtgtgacggtctgcacgccacggacccatcgccttgcagaaaggctgagcgctccggagggccgggggcgcggtggcgacctgctcagcgggctccatgtgggcgtgccgcgggaaggtcggctttccttttgcagtgtatgatttagttcaggtcacctggaaagagtcaacatgaatggaaacagatgcatctcgaggcgcactgcccggctctcggacaagcctcttcctcccgcacagacagtcctcccacggccagggaggagagcagacctctcctcataaggagcacgcggccacagcctcggcctctgacgcgcagacccgggcacgggccgcgctcgggtcctggacgcgggttcgttcgcttggtgcagctttgccggcgcggctgctcatcgagatagatgccccctgggaaggcctcctgacggcgtgtgctctgtctgccgccagaacgacatgggccttaaatacgcacagaatgagaggggcactcacagggagagacagaggagggacaatcagaggacagacagacagacagaggcagacggcagggacacagagggagactgatacatacagagagggagagacagagacgcacagagtcacagagacagcgagacagaaacacagagaaagggagacagacgcgagactcccgggaagcgacagagaggagagacacagagagagagagcgggaaaggctgagaagggagagaaacagagagaaaggggacggagagagagacacagatggggttctccaggccagaacactggagtgggctttcattcccttctccaggggatcttcccaacccagggatcgaacccaagtctcccacattgctggcggattcttcaccagctgagccacaagggaagcccaagaatactggagtgggtagcttatcccttcttcagaggatcttcccaacccaggaatccaacccgggtctcctgcattgcagggcagattctttaccgtctgagtcaccccaaagcccatgcgcatactcagagacacagacagacagagacagacggctcccggggagagggggcatcctggatgggcttcgagtgggtggaggggctgaaaaccttccatcagcacagcctccgggggaccactgacccctcacgagggccccttgccgtgaagcgagccggctgtggacaccaacaaggcaggagaggacgggaggccgtcggtgtggctagcagtgggcccgctggggggcggtggcccggatggggggcggtgggcccgtggagctgcacttctcaggccacgtgcggggctggccgagtggagcctggaggcccacctgcagaggggctcgggcgtggccggctggaccccaggtgggctctgacccacactcgggcctcctccaccatctccttctcagcgagtagccggcccgggactttcacgtggccccggaggtcagcgcaggtgccccgtccagaggccctgcctcacagctcctcctgcgctgatccctgggagcagcactgctggagctgagctccaggatgcaagctcacggctgcggcctgctccacacccagccgtgcgcgctgcgcgcagagactcgggaccgtggctctcctgtgcgctcctcggtccagttgccgttgcagtcgccaagtcatgtccgactccgcaacctatgcactgcggcacgccgagcttccctgtcccgcaccacctcccagagtttgcttaagtcaatgtccattgaatcagcgatgccatccgaccatctcaccctctgccaccctcttctcctgccctcaatctttgcaagcatcagggtcttttccaatgagtcagctctttgcatcaggtggtcaaagtattggagcttcagcatcagtccttccaatgagtattcattcagggctgatttcctttaggatggactatctccttgctgtccaagggactctcccagccgatgccgaacttcagatcaaggactcagcaaacgctctcctagtacaatggctcagagacgcaagtatccgctggaaacttcctttacccctaaggtcacacgggtaagttcaagtttggggtggtgaagctttcagctaggactttggttctaacaaattgttattttcaccaagggaaccttttggccaagagcatggatcttggatccacgtgtaacatgcttcctacagaaaaaatggtacaaactttggacagcttttgcaggcactgcatggggctttttcatgagagcagccttcattcctctggctttgatttcttctttggatgcatctgaagcaagcaacccaaccccagtcaaaccactcatcccagcatttatttaaaatcgacttctgggatgagcagacagaaccgttgccccaaccccgtgaggtgactcataaacgacttcacacatcatggccttctggctacggtcaagggtggtacaggggcttcccaggcggtgcagtggtaaaaaaaaaatccacctgccaatgcaggagacacaagagacacaggttcaatccctgggtcgggaagaccccctggaggaggaaatggcagcccaccccagtattctcgcccggaaaatcccatggacagaggagcctggcaggatacagtccacggggttgcaaagagtcggacacaactgagcgactgacagaaaagactgggtcagagaggttatacaacctgcccaggtcacacagctgcagtctgaactgttcaactccaaggtatggcgccaggcctgcaggactttgcataaggggagaaaggaggtgctggattttagggcacgagactcaggcagggccagggccacgccacggtgggtgagcctgtgtgcgcaggctgggtgctccagcagaagcagcgccgtgagcagggagcacgcacaggcctggagcccccgccaccggcgctgcagtctggatgccccggaacacgcgcggcctcctggaatccctgtctgtggtttggccctggtggccgctcctgcacacgcctcctcaagagcattcaaaaaggatgtgcagaatatattttagaaaacttatgaatttttgcctaactaaaaaatttatgacattttgattccacttgtttggcttagtatgcatagaatgctaggtttctaataaaaaaaccaacagatgtgcagcaagcagcaaaggcttactgtagagcacagggaactatagtcaatatcttgtaatacctaccatggaaaataatttcagaaataatctatgtgtaactgaatcaccctgctgtgcacctgaaccgccacaggtcagcgatgaaagtgagagtgaaagtgctgctcgctcagtcatgtccgactctgccatcccatggactgtatataaattaaaaaaataaaaatgacacgtggatagagacgtgagtccggaaggagaaactccttccacctccttgcagggttgtttcaccaggacttctggaacgtgaagcagtttccctgtgtctcaaaaaccaatccagcttgaggcctgttcagcacactagcatgagagaccccagcgcctcccccgtggggagaggatttcgacggttgtgcagcctcggctcatgggctccgctgagtcacagcgaccgtgtccctgcctccccgtcacgggcagcgcagggggccgggaggcccagcgaccggtgcagaccccgcctgggagcccactccccacgcaggcctcagccacccgtctcctgaccgcgggctgtcctctccgctgacttccacttggaagtgtcttcatggctgaacaaagccagagaccttcccactcctaggaagctgcccgtggagcttatacaaaacgcgtctgctcgctgcgcacttcatcctgccatgttctgttggtgtctggcaagctagacgtttgcggggcgagctggtgattggcgcggtcaggacaaacttcggagtgcttttttcatttttaaacgattcaggagtggcccctgagagacagtgtgttcaggacaaggcctctacgcaaactaaagatgcacaaatgcaggcagtgttagtcgctcggtcgtgtctgactctttgcgaccccagggactgtagcctgctgggctcctctgtccatgggactctccaggccagaatgctggagtgggtggccattcccttctccaggggatcttcccgacccagggatggagcctgagtctgttgcattgcgggcgggctctttaccacctgaaccaccagggcagccctgagatggacaagcagggcacagtggctcgtgtgcacggtgactctccgccaagccctctcgccactgcccccagcacacgaggcctggcatcctgccggcgaggcactgggcaggggaggggagcctcagtgcaggttccaagccggtcctctgagccccccacccacctgcctgagtttcccgggagagactgatgtccaccctttcagatgtatggagggctgcgcgtgggctctgtgggaccagtgctgtcttggcggccacgggaaggactggcgaggacctcccagccctcctcctggctcagtgacccagctcgtgggcacgaacgcacctgaagctcgcaggagacggggcagggtcacgggaggcgtccgcgtggccctccggccacggcacctggagaggacgctgggcctgagatcctggctgcagtctgagccagccgctagctccagaatcctccattaacccttgtggggttaaatgcctgcaggggagtgatgggccaactggagagggatttgtgccggataaacgaaaatgtctaattgtgtgctttctttgtgagttttcccctctgccaaattcttgaaattcttaggccttacaattttatgtgctttccatttcaatttgaacctgaaacgtcatttaaatgtcttctgaggtaatcctcacctactcaactcccaaaattgaaaaaaaaaattaaggttattcgactcacacctggagagtttttgaaggatatctgaccaccagtcataagctctcagttgatgaattgcagattcaaataggtaagttttacttcttggtacatcagctgggaaaggtcattttattaagggtcattttaaatgtttataattccactgccatcatatctataagacctcttatataaacttccagatataaaataagtaattccttttagcaactttcatacagtatgtttgaaagttgttagaagagttgatcttgtacttataacttggtgatggatgcattgttaatacgacaccgtggtgctcatcttgcaatatatacacacagtgaatcaccgctgtgcatctgaagtgagtaccatattttacatcagtcgtatcaattcaggacatccctggtggtccaggggttaggagtgcgcctgccagtgcaggggacacaggttcgatccctgctccaggaagattccacgagccagagagcgagtgagcccatgcaccaataccgctgcagcccagccctctggagcctcagctctgaaacaagagaagccgccgcaatgaggtgctcacgcaccacctctagagagcagccccctgctcgctgcaactagagaaagcccactcgcagaaggaagacccagcacagccaaatgaaaaactgacattaatgaaaaatgaagacccagcacagccaatatgaaaaattcatattaattaaaaacatgtaggatttgactgccatcaagcctacaagacctttgatgagagagtaggaaattccccagttctaatgttgaaggagggagcacaccctctcggaggcaagagcctgagcagcccattgtaccttccttgttcccatgacaacccacacagtgggcaagctatggggtccgagcgtcagctaccccaggcccagaccctctccttgccgtcgagggagtctccgcttcaggtttcaagggccttccttgtggcaggaggagaaagttccctcctgtcctctcaaggccctttccggccctaaggttcgtaacttgaagattctgggaccccattttccgtgtttgtgcaccaaaagcaggcataacgaaggctgcataattgggagactgggaggcaggccccccagggccttctcggttctcatggaaaggtccagacttgccattctgtctattctgggtacagtggatgcctgaatcctagagctgatctgggagaggaaactggaagccgcaagcctgacagagacgctaggaacatgcctgctactctaggcagcaacagcaagaagcactcaaaccttcaaggcactggcttccctggggctcagcagtgaagaacctgcccgccaatgcaggagacccacgtttcatccctgggttgggaagatccccctggagaaggaaatggcaacccactccttgcctgggaaatcccaaggacagaggagcctggtggctacagacactggggtcgcaaaagagtcagacacgactgagcaactcaacaccaaccagcctacaaggagccagaagggagactcgtgggcagggctcctagagtcccccctatccgatccaaggaaccagaaatgaggctccaagtcccactatctgctcctgcaaggctcctagagtccccactatccactcctgcgtcgaagtccatgcaacagtgatggaggaccacggttcacatggaatgaaaacagaatttcaataactcatagatgattttctaaaaaactgagagatgccttccctggatatatcctgcttcagttcagttcaactcagctcactcagtcgtgtccgactctttgtgaccccatgaatcgcagcacgccaggcctccctgtccatcaccaactcccagagtccacccaaacccatgtccatcgagttggtgatgccatccaaccatctcatcctctgttgtccccttctcctcctgccctcaatctttcccagcatcagggtcttttcaaatgagtcaactcttcgaatgaggtggccaaaacattggagtttcagcctcagcttcagtccttccaatgaacacccaggactgatctcctttaagatggactggttgggtctccttgcagtccaagggactctcaagattcttctccaacaccacagttcaaaagcatcaattcttcggtgctcagctttctttacagtccaactctcacatccatacatgaccactggaaaaaccatagccttgactagatggacctttgttggcaaagtaatgtctctgcttttgaatatgctatctaggttggtcataactttccttccaaggagtaagtgtcttttaatttcatggctgcagtcaccatctgcagtgattttggagcccagaaaaataaagtcagccactgtttccactgtttccccatctagttgccatgatatcctgcttatcacccataaataacactcactagtggtaactttcaatgatgttagtacatcaaccaaagggatcttatgggttttttcatccattcctcagataacggatatggtacgtgtgtgcgtgtgtgcgtgtgtgtgtgtgtgtgtgtgtgtgcccgcgcacacgcatgcatgtcccttgtgctcgattgtgtaggattctttgtgacctttggactgtaggctccagtgtccatgggatttttttaggcaagaacactggagtgggttgccatttcctcctccaggggatcttcccgacccagggattgaaccagtgtctcttgagttggcagggaggttctttactgctgagccaccagggaacttatggttgccccagacattacagagagaatgcattcagtcagttttgggttatcatgctgtggaaaatttgtttttcaatccagaaggctgttgaactgctttttttttttttttcattgcagataactcaaaactggtttggttccatgacatcagccttggcacgtgtgaagagcaagaactttgccttgtttggaaccgagaggagcctctactttctcttttccatttttatgaagacagtattttttcctcttagctggatgatgtatacttttaacattccagggggaaagtgtcagtgatatgcaagtcataataaaagaaaatcaaaagaaatgcaattacaagggacaaggaacttcatcatttttagtatgaaacgcccagaggaaaatctaatttaaaaaattaccggcaccatatgaaggagacaagaatatacagaaagatttgttactttaaaaattaacttaatctttctgggtctcggtcttatttctctttatttttaaagggcagaaagtatcatgtgatgttggataaggagtaaagctcccatcacggcgacgtgatgctgggaagtgacaacggaatcccctggtctctgtctgtggcttgccggctggagtgcagcagggcacttcacgagttattaagagtgaatgtatattgcggatgaaaccatgtctctttcccattcatataaaggtacctattaaaaatgaaaccgtggacttccctggtggtccagcagtggttaagactccacctgcctatgcaggggaaacaggttcagtccctggcctggggagatcccacatgcctcggagaaactgagcccacgcacacgaccgagccccaggcaccctggagcccgagctcggctgcaagcgcggccaccaccacaagaagcctgcgggcatctggagagtagcccccccgtcagcagccagggagagctcgtgcacggcagccaagaccagcacagccaaaaaataaaaaataataacaaataaggtgtttttaatgaaaatgaatattcatggggcaccctgcagttgatagaattcttccatgtccatcaactgggtttgatcctccaaacgacctatagataagtcatgactcttgtcgcctctaccagactgatggtcacgaagaggttactcttccaaagacacatggtctcctgacggcggaaccaggactcaaacccagaattctgacataaagcatctcacccttccactctctcacacggccaccctgatcggagttctacgactgccagctaaaccggcttgcacagaaccaggatgtcataagctgaatacagctgtgatttgcttatttataacagctctgtctctttgaaaaagagacgtcatttaacaactatgagaaaaaaaatcaagctcacttctatcataaacgttggctgacgttaggggactttgacttatttctaacccagcgagatttaattctgccaccctcaacccatactaagagaaattggaatcattcattatttagagggagagtccaaataatattgcaatatcacaggcttcttttaaaagcctttttcttgatggaatctctgattttcctttcgggcatgaaaaataacactgttattattagaggggcctggccgagggttagcagtgaggaaggaaggagatggcgtgaataatattgatttctaaccttttatctagtttttggttggaatcaaattcagtgtttagctccatagctttctctatagtaaggattctcttgacataaggctttgagatttgaggagataaatttcctttgtccagatgtgatttttctccacttggctggagtcagcctgaaaatggaagacacggaggtctggtagaaagattcctaagggttctctccttttcaagagtggattccacaaaaagctctctgctctcatctgttagcagtagtggtgggtctagtaggctcagagaaaaatagagacatcacttttctgtccactgcccactataatgatttttttcttttattttttattatttttctggcagtaccacatggcttgcaggatgttagttctctgaccaggggtggaatctgggcccagagcagcgaaagcacctcaccactgggccaccagggaattccggtgccttcttttattgctctgtacatctgctctttttgtccttcccttgtatctcaatgggccatcctctcaccttctcttagcatctgtctttgctcgcatctagcttgtctcagggcagtcttcccaggctatgaagctgcaccactgagcctttcctgaactccccagcttggcacaggctcttgaaccaggctctgcccaggcttccagtgaggtgtttcaggctgatacaccaacagtctccacatagggataaacaagtagacccagatgggattcctaaaaaccctgaagcttagtaagcatgttttgttgaaacttctggcagtagatgttctaggaatgctggaatgcgacataaaatttgctgcctaggaaggcattacccaggtttcgagaatggagatgaattctccaacctccactgggcgactcttgtcatattcttctaattgaacaggcaatattcttcaaaaagtcctaagccatgtctccactgagaaggcaaatgggcctcttttcaacctacctacactgagccctcatggtgtttttcaataaacgactcaagaagtcatctcggtttcctcttctgtaatgagatgagggacaccccctgcttctctttcacctcgctcattgctcaaagggaattttcccccttcttgtgcattttctataaattagcctagtagatgggtcaaatgaatctgttcagacttccccccaaaattcccttccccaccctgccagtatctgtcctgaccctaagctgcttccccttgtggctcacccccctgccatcctaagcgcctgaccgtctgtcctacaggatttcccgggcatcagctcggaggccagtaggacctcagctctgaggtggacttgggggaaaagcactgttcctccccgccagttgcagacaagtgtgcgggaaggcaggagggggtgcatgagaaggtggccctggggcaggcgggtcacggccatgtggcccttgagcgggctcactgaggaagggccggggtctgcaggccatccaggcccgggggcctcggtgcaggagccccgcatgagagtggaggaggggatccatgtccacgagcaacccctggccgcgtggctttccaaacaaaaagctcctgggaagatcgtggaaatggacgtcacagcctgttccatttctggaggcccaacccaagttctcctccttcccagccctgtggatacacgctcatttccttggcagccttagataaagctattaatgtgatctgagtgcctcagagattagcatgattataaatatgagtgttcaaacacaagcaagttgaaaccaaatgcccctcaaacactggctctctgtgataggaaggtttccggtggtgccttgagcccttggataaacgagctggaaaatagagtgaaatgggcccgctggtgaatccccaaggccacgctcccacacagctaggaggagacgcactcgctgctcccgacgtatacaatccacggtggctggcagcagagctctgggcgagaatctgagaaacactaattcagaacttcaagcaggggctctggtgggcgatacagaggctctgatcaaaacaggcggtctttactccacagccaacctgcaaaacacccccttcatggtctaactgcctggtggggcttatgagaggctcctaaccaatagttataaatagccaccaaggagtttgtttatctacctaagagaaaacactgttcaagatttttaaaacatgcatttgacaccaaagagatgtaactgctatgggcgaagaaacagcacgccagaccgagcctgctgttttgatgtggtcactatttgctaagcagacctgccacttggcaacacgttgcgcgcccaactctaggtatttgaaagtttagaagcacacctctttcaagaaattctaaaattaaagattttttcattaattcgtcaaaacctttccccaagttagtccaaaagcctgagattttacttgtcaggccatgtgaagacagaagggatcctgatggctggatcttttctttaatctcctagcactggtatcaccagtttttgtcaacctaaccgaccaacttatttgtagagcgctactcctaaatgttaaatgataaagtgtaaaaagtgttcccaggaggcaaaagatagtaacttacaagctgactgtcagcatctacatttttttaattttaaaaagctttttgtttggggatataactgattaacaacgttgtgatagtttcaggtgaacagcaaaggaactcagccacatgtacacgtatcccctctcctcgaaactcccctcccatccaggctgcccctaacatcgagcagagttccatgtgctctacagtaggtccttattggttatccattttaaatatggcagtagaatccagtatgtgattggaagatacagttgtgtgggtctggtgaaattctaggacacccactgtatcaggatggtaggtgatcaggggaaaatgcctcatcagtcttcaattccagtattttctacctatgtttctgaccatagagggcttccccagtggctcagctgtaaagaatctgcctgcaatgcaggagacataggggacgtgggcccaatccctaggtcaggaagatcctctggagggcatgggattctctctgtgggagcctcccatggacagaggagcctggtgggctgcagtccatggggtcgcaaagagttggacgtgactgaaggcagggagcacacacagtctgaccacagcgcctttggtagtgggtatgggaggctagcacacccatggaacacagttctgcctggatgccagctctcatccaataccacgagctgccagttctacccacagctaggccagctcagaactggcatccagtccagttgcaggaagacccaccacctgtcactctgtcacctgaaaacctatttcacttggcctctgattctgcactccaccctctgcccccggaggcggcgggatgctaaggacagagcacaaacgtcagaggaagacagaactgggctgcgacctgaactctgcaaatccccagccgtgtcaacgagtcggaagaattcatcgttctcttttctttcgccggaatgcttcagtctgacttgggagatgagatcttcaacgtctcagagcctccatgtcttaattcataaaatacagaaaagaaggctctcgttcgagcgttgtcctcagaataaatgacttctgtgaagcattttagcataggcactgccatcagtcattgtgaatgcttctactcccctcatctttccgtttacctgtcagagatctcaattctcctcttctttcaaagaagtgataggaaatgcaaatgtgaaaagaaccgtgtgaaaagcttaaagctggtaaagttctttttgcaggatttgtagcttttgatttgagggatctcattaatattcccttaacatcattagtcaagggaagttcttgaaaaaacaactcaaactagactcgatacctctgagccattatacccaagcctgcaagagctctggagtcagaagaagctatgccttcctgacctcagtgcagaagggctagcctgtcctcatcaagttgggattgatgagtcaaacttctgacttttcctaagccatgaggtccccacctggaatattctatgagagccagctactacaaaaagtcaatggcaggtccagaggtggatggacagctgaaacagtcaaggggagatgaaccttccataagacaataatatttacaaatcatgtgtggctctggaaagaggaaacctgaatacagatgctagagatattcatgtaacttttactggtaccgaaagaatgaaaaccactccttcgtcacacacctgagccttccaattctgggcaactggagtttagggacaaagtctggttttgggacaaaaggcaatgcaacactatatcacaaagtttatggacgtggccacacgccttccccaaggagcggacacctcacagccttcctaacaagccagccacaacctcgctgacaggcttgcaggctgacggctctcaaatttcttatgagccccgatctaatttgttattgttcagtcgttcaatcgtgtccgactcttggcgacccggtggactgcagcacgccagacctccctgtccatcaccaactcccagagtttgctcaaacccatgtcattgagtcggtggtgccatccaaccatcccgtcctgtcgtctccttctcctcctgctttcaatctttccccatcagggtcttttccaagtaaatcctagtttagaatcaaatatatccacatagaactcagtgacttcaagcccagcaccccccaaagggagctcgctaagctttcctcaatctgcctttagaagccctgtcagcgcctctgaacccacagcccggctagaagcccacaagtggcctccttccccttctccgctgccgcccaccgccgcctgccatgaggccactcctcttcctcggcccacccctgctgacccctcagccccgcggcattgctcctgtgctcccggcctcgccttgtccctccagcctactcccagcgctgcttccggggagcacccctcaaagagcagagcaactgcacccttctgtctcattcccaggccctgagcggtttcccgtccacagtgagctggccccgctgacgccctcagccccacctctccgcaagcccatctcccaccttcagctccgtgtgctgctggaagcatcagcccaaagcctggccctttcagctgaccctggctcacactgcttttccatgctcctcaggaccctgcccagacgcagaggacaattcacattggtgtacaccagaaaccaagccgacagtgtaaaggagctcttttccaattaaaattctttaaaagaagatgcaaaagaaagaaaaaaaaaaaagaccctgctcaaacaccacctcttctacgaagcctttcttgaccaagccccaccacctccccacgatgcccacttctcatcctgcccgtcaccgctccctggtgagccgccagggccccctctccccaagggcagggcctgcatcctacccaccttattcaccaggttccgacggtgccaggcaccaggtaacagctgtgaaaggatttgtgggatgaatacacaaataaattgggatcaagacaactgaagcagctcaatccataaagactgtgccatgctccagaagatggacccgtgacgcacgaagcgtctcaggacggtctggagctgagcccgcgtggtatgtagtcgagtcccgagcgctgaggcggatttccgagtctacgacgtcgtagctctcggactcggcctgagatgtccgatccctctgagcccgtttcttcgtctacagagacgagggcatggcgccgctggcgcccagggctggggtgacagcggccttgagacgactttccccagcgggtccctcggccgcggcgtggggggccggcctctccgcccaccgagagggctgaaccggggcctggggccacgggaccgagcacagctcccgcctcgagggaccgacgctccgcctgaagcagcgagacgccctcactggagaggctgggagccgcccgcgaggctgacggtatcagaggggtcgggaagccgcacaccggccggctgggggcggggccgggggcggggcgggcggggcggggcggggcggggcggggcggggcggggcggggcggggcggggcggggcggggcggggcggggcgggggcgtcggcgtcgagacgcggctccgcctgccgcctctgctgccccctgtcggcgcggaggagagcagagggcgggcagggcgcccgctggggcccgcggagccctcctcttgtctgtccctggagagctcgtcacaacctctctcttctgccctcaacgccccccgcccccactttctctctcaggtcggaggtcaccaccgggggtctcccaggccctggtgtggaccaccgatgggacggagcaagggcgctgagcgcggcagggcctccggttctcctgcccggcctgcccgcgggtctccccgaggggtccccgaagcctgttgccctgaacgcctcagtgagcattcatgcagcctgctggggggcggctgcggccagaggggaggacggagagtggacggcaaggcgctcgggcagcggagggctcgtcccttgggccgaggggacggcacggaacttttccattcacagcggcccagcgccttcagctcacggaacacgactaggccgcgggcgtggaccactccaggaaaacctgtgctgagatggcgatctcaggatttccaggagagcccctggcctccacgcactagactccgggagcagccccagcctcctcgggacaacagagacgccggccaaccctgccactgggccctgggaggcaagctcgccccccgggaagccctgccgcccagccccgggggctcccccagacgccgggctgggcgttcccctgcacctcgcccgacccgacgctgcaagaaggccccctgtgcacgacccgtccgcctgaacctccagaaagagaaacaaggcctgggaggccctctcctgttctgttcaggaactgccaacccgtgggtttcagaaccgcaaggggcccctcgcctgcagtcctaacctccccatgtcttggacacccggagacgcgggtcagagcgcttgtccagaggaagctcagggctgcaggagcgatccctgacggtcggccggctgtcttctccattctctctcccctgcgctggctgcttggtgagaaaacgacacagcggagactggcgtgagcccaagccggaggccaccctccctcacgcagacagccctgaagctgttaataaataaagccttcacacacgtaaacaattacattaattgtggctctgacggtttttcccctcaaggaaccaagtcctcaattggggttaggaagaagacaaaggaagcaagaaaacggagtcccagagaagtgaaatgtcagccagcatggacggcaggaccagacacctcatgatgtgaacagtggccccaggggacaaggggcccccagagtgagtgccacccagtatgtctggaccgtgagagatggcgtatcccacggaaacccctcacctggggttggtccataaaacagcacaacaggcaactgaacagagcccccagaggggctcccccacctggctctgccatgctgttttcagtgaaaattagtactggctgcttccagctttcaccttgaactcagctgactgtatcttctctcactcattataatggtaacaccgtgtacatcgtaaaggtcacacctgtgtttatacgtcatatgtcatcaaaatactgtgaagagaacgctatgtggtctcaatcagaagatcaaaaagaaagaaagaaaaaaaaaaagagcaagaggcaggcccagcttctgacgcagggcagcttggctcttctggagccccaggatgggccggggcccaccgaggccaccagaggttgtccaggccaagtacacactgtttattgacagagagacaaactgcacctgcctggtttcagggtgaccagggaatttccactctggatacgagaaaacttttacactgtacccattctttttttctttcaaaagccaaaattagaaagaaaacaaacatatttggggctcaacatagcaggaaaaagaaactcagaggtcaagagatttcataagaaaagctctgaccgggtcttacctcacctggcttaaagtccaggggtcctgagattggggtgagagttggctgtagccccccagggccctgggaggctagctgtcctcagaaaggtgcccaggtagaggtgtccctggttcccacgctgcaggagcgggtcatgaggacgctgggggaaggagggcagaggattcctggaggagcgtttttctagtctactatagtggtgccttgaggtgcaattaataaggaactgccaagaacaattggacagaaggaacttagccattgcctccctctgccaaagcagaactaacccgatactgtttacctggccgacccgtgacctggccctcgcaggcatctcgctaattagcatattccccgtagcccaggccttggaccggctgtcacacactctcctacattctaggcctcagtccgcttgccacggggccctccaagccccccaggcggtctgccagctactcctgggacagtgagatctgttcctccctccaggggcccttacacctgtgggcacaccggctgtcagcctgttctggccccggggtccaagatccacatccatcttcaagaaggcatcctctgaagcagtgtgggaaaaaaagcttttttgcttgagaatcaccttgtattgtactgacttggaaacaggttggtcagcttcccttcaaccaggttgtaactgaaaccaatcagtcttcattaacacgcaagaggccaggggtgttttataaagctgctgctcaccatccgggcagttgtgagtcattcagtttatgtgagatcattcaggttataagatactggatgaatccacgatctacaatcatgtgaagacagatttatactctggtgattttttttttttaagtatctcaattgggttcttttctcccaagcagtggaaatcaagttatcctctgccccgccttctccagcccctgattctaaagagagctgagaaaaactaaagagagctgggatcaagtcagacttaaacaaaacaggtagggctgggcaagtgattttcagcaaaatcacaaaaacacaactgaaagagaactattcttaagaaagactcatgtaccataaaaggggaatttccagaagcctctcttattagcaattcgctcttccattcccttcctctctagtttcaagatgagatgatgacaaaaagactgacttgtcagaaggggaaaaaaaaaaaaacacatgaaactccgtatacaaacgtgtaaacggacagagttgacacttgtgggaatttccacacctgttcttctgagggccatgaagaggagaggagagagagaaagcaaagggaagctttgcccccacctgcatccatccagagttgtgaacgctgttttcttacttttaaataaatgtcactacttactgagcacatgttttatttttcttgtggggcaaaaatagtttccccaagtaaaagttctgaaatggattctttttttttttttttcagaaactgacatagctgggaattttctgaaaactgcaagtgtatacgtttctcctttcactttccatttttacacaagcattggaggccaacatgcactagctaatttcagtagaatgttccagagcgtggggaaggacaccatcccaggggatgaggggacatttattgggcatttgtttttcataaggcctgggatatctggtactgtgggggagtcagattcaggaaatagaagaaaaaaatccaactgaatagggaaataagccaaacaaaaatggacatcaagataacaaaccacatatgaaaacacagacgcatgcacatagccagctgtagtttctacaagccgggctgaatctgctcaccttgcaaagatttcccgtacgggggtgggggaggggagactgtccatggatattcctagtctctactggccagctcttaatgtttctgaaatccctttcagtggagccatttacatcatgtcctctttttattttttccacactcaagccactttattaaacattttcctggaggtataatttacctatagaaaaatgaacatttgtgtgtgtgtgtacagttggatggatctggactaaaagcggaagccaccccctctgaagatacggacgcttttccatcctcctggaaaggtcccttgaagccatttagtttgaacattatttgcatctgaatgtttcagcgtggagatgatcagagccaaatgtgtgggagccaggctcgtcatcaatcatttactgcaaacatagcttgtgaaggttccggagacgcgaggtgagcctgcacggacacgctggcaggggtgggcgtttgtaagaggtgcctcgggatttctcaggggcaacagcatgtgggccccgctcagcagccctgctggcgagctgaccacgcctctgaagacccagaacgcttcttttctggttctgttcttcaggcatcggggttaacatgtttagaaagagggaagttgaggcgggatagtcaaatcgaccatattctcgaaggagcagaggctctgtgacagggagggtgcggccacggctctgagcactcttttccaaaatttattgcaacatcgaaagaggagttcacatgaccgggcatattagacattttcttcacatttcctgtttcccaaacttccgaggagacttcaggggaatgtctggcccggagtcaccaattcagggtgagggacagagactctcttttgcgagggtgcagccctagggccagggcgggggtggggctgggaggagaagcaaggccccaggcacttcctctggggagcgggcaggggtgccccgcgcccggaacccggactctggccgagcggcggggggccgaagaccagacgaagcaggagctgcacctctagtctcgtttctcacgaagggcggagctgcttcatggacatttgaatcggacgtcttcaaagcaaaaccggagtgaaaaaagtcccaacatactctgtagagagcaggtgttttttttttttttttttctaaatcacttttccaaaatggtaccccgaggtaatcctttcttaaatcttccagcaatcaaaacaatgtggttacaaaagtttacaactttaaaacctttcaaaggtcacctccctgcctcacaccctctcacattaagagcataacggatattttgagtcacacatattgttctttgttcaatttgcatttggtgaaatccctcctttgggctaatttagtaagcaagcagtgccttggcctcccttggtgattgttctctcctcttctctattttttgcgtgtgtcaaaaaaagttgagactcccagtggatccaatgaaggggcagcctttgtccctgaagcactctttttgctcaggtggtttttccaccatgcttgggatggaattccttctccttcacagctctgctaaggttcctgtcctctgagaccctcgcagacctcctctccttgtcccctccccacctgacctcttgtccaaccaacacacttctccatatttcaggctcagacgtttggtctccaccatctgactatattactgaaggcctcaatcaagagttctcactggtgctcggtgacagcctggagggatgggtggggaggggactgggaggggttttaggaaagggaggggacacaagtgtgcccggcagattcatactgatgttcagcagaggccatcacaatatcctcgagtactcatcctccaagccatatatatacatgcgttctcgggacttccctggtggcccagggatgaagacttcaccttccaaagcaaggggttcgggttccatccctggtcagagagaccaggtgcctcaacgccaaaacccaaaacataaaacagaagaattgtaaccagttcaataaagacgttaaaaatggtccacaatgacgacaacatcaacaacaatcttaaaaaaaatttaggagttgttgtgccaaagtgagactgtatgagaaagactggctaaaggtggagcgaacccaagcagcccctgctccagcgcgggggtccccgcgggtggagacgctcagccgcagctccggccgcagcagctccggccgcggcagcggctctcggcccggaggctcactctccccaccaggtgctccgtgcacgccagctgccacgggaggcccgagtgctttatgagactgcctgctcactcccccggcttcatgtgtaagccaagggtgcttggcttttagaaacatatttctttctctatgagtaatttacaagtgactcatgctcagcttcaccagccagcccatgtgacccgcggtgctgggtgagtgtatctatagatgtgtaaaccaaagcagttcttagaacacagactcccccgcccacgtgctgtttatttccctccacttcacaggcaccgagcgatgatacagatgagctgccggggaccgcccgctcctcactcaaggctggaacgggcccatgcggagggaacaaaacagggcttctaacaagagcaaagacaagaccggaggaggcaagagccgggcagaccggccagcagacttccttcgtgcaagcagatgatcacggagctctgagcaaagcccaggaagacgcaggacgacgagcattcacctgagcaaacaccaccgtctctctgcgtcctagtcgagatttcagacgtaaataagtagagacagcagccttaccacctccaagcaagccaccacggcctttcctaaaacagaaaagcgttcctggggtctgtggtggctggtaactcacgcaggggaaaaagcctaatgcctccagctcgtcttcgtcactggaggacgcgcagggcctggcgtggggacgctgctgtggcgggaagggcctcgggagacacagctgccaagctcgcagagagcccgcagagagctccttctcacttcctttgctctagtcttgcctgctctgtgaagacctctgcagtctggcctctcacttgacctcccggtgccgtctgcgctcaccgtacggttcgccctcagcctgggcctgcccttgctgcttccccaccaagccccccaacatgcttgatccctgcctccacctcccaactccctgtcaccttgtcacctccatcctgcaagtctgcaccccatttccaaactcagatcatccttccaggatcctggtttggccacccaggccggctgccgtaagtgcctccatctctggaaggcctcccacgtgtcacctgtctcccctccagctccacttgaggcctgacagtcacgtttgtccagctggactacagagtgtttgaggaggggcatcctgctttttgttcccatttatccccacagtactgagccccacagcagtgggcatgcaaagttcccagttaaaagaaatactttattttagccaaaacagtattgtatgtgaggtcttaccccaccttaaatcctcaactgggaaatcaacttcactatgcgtcctaagtggaggccatgtggagagaaacaaatgccccgaattttcaacagaatggccaacatgagacataacgggaatttcagagcgctgtggccaagcgtgcgtccaagcactcagcacgcatcagctcatctagacgcagtagacaccgttacacccccacttctcacaggagaagactgaggcagaacaggggactcatataaagccacatggctggaaagtgctggattcaagctcaggtcatgagactccaggctgcgctcctaggtactatgctgaattcccattaacaagtatgtttgaggtatctgtcttctacacgggtatcttgccccagttaggtatactaaaaaatatcatcactcaagtgacggttaagtatcatcctgcccggaaacttttataaaaagagaagcatggttttatgggagctaaataatagcatctctttgcatgtttattcattgtttatttggctgggtcaggtccttcgttttggggcatggactctccagttgtggcgtgcaggcttggttgttccgtggcacgtgggatcttagttccaaagaaagagaaagtcaaagtgtcagtcactccgttgtctccaactctctgtgacctcatggacaccaggctcctctgcccatgggattctccaggcaggaatactggagtgagtcaccattcccttctccaggggaccttcctgacccagggattgaacccaggtctcctgcactgcaggcggattctttactgtctgagctagcagggaagccccttagttccccaaagcaagtaagtgaaaggcactcagtcgtatccgactctgcgaccccatgggctatacggtccgtggaattctccaggccagaacactggaatgggttgcctttcccttctccaagggatcttcccaacccggggattggcccagagtctccggcgttgcaggcgggctcttcacaagctgaaccaccggggcagcccaagtggtgctcgtggtaaagaaaaaaacccgcctgccgacgcaagagacagaagagactccagttcgatccctgggtcgggaaaattcccctggagaaggaaatggcagcccactccagtattcctgcctggagaatcccaaggacagaggagcctggcgggctacagtccactgggtctcaaagagtcggacacgcctgagtgactaagcacacacacacacccatttagttcccaaccagggatcagatccgagtctcctgcatcgcaaggcagattcctaaccaccggaccaccagggaattcctaaaagagcaaaagagcatctttaaaggaaagggagtaaaatctcccagtccatcccagggaccctgcagattggctctgaccatgctcagcagaaatactaggttcaaacctctgggccaccttgagggagcatccccttcaggccaatgtgactttccacccatcagaatctcccccaaatccttaatttctccacataaagaaacctaatacaacccaaatcatagctgcagttagatctgtctactgcattttcatacgatcttgcaggcccacacatggcctgcttgagaacatcagattaggtacaagaagaaaagcctcatcctggtggtcaaatcatggcaggaaatgatgccaccagcaattattcatgtattagcagttgcttaagtaccataaggcttttaggggaaaagactgtgagccactggttggaaatgaagccccattattaatgtagtcaagctattcagctggattcaataaaataaaaagccctgcccagaccagtgtctgtagtagaagatgctaagagctattttttaaaaaatctggttttattgaatccaggctttatacacagcattgcttcttcccgaatggctgaaaaatcatcccgtgcattgtaagccatttgagagaaaatagacttaaactgtatcaggaaagtacagttagatttaaggagagcgcttcataatattccaggcaatggagaccacgggagccctgggtatgctgtcaaaacaggcagcgaaaccctcctttatcaactcagctcaggttctaaaccgttcccgggagctgctgtgtgccaggacccctcccggccctggcaggccctgagcacccccaggcaaacaagccgtgagtcctgctcgtgagggatttacaacccggaggaggagacaggcatttggggccgaccagcgctggcagcagccgtctcgtttggacgaacgtacttgctgcaattctgtctctgtgtttctctgtccctctccctggactcatcgctgccacttttcacgtctctggctccgtcttcattgctctgggacagttttatccccatctcccaggcctcaagcctcagccctctcgggcctggggagccctcaagaatcacctgtgtttatccctccaactacagccttggccaactggtcctgtctccaccgccctgctcggtggccgggatctcagtggtcagtaacgcaggagaccctgctgattcctagtctcgctcggcctcaggggcttcacaagctgaaaagaagttgtgggaataattactccttgggtgaaggcatcaggccaggtgtgtttcacatgtacctgctcgacaaacatgtacagaatgccaagagccaggtacaggcttccgtggtggctcagacggtaaggaatctgcctgcaatgcaggagacacaggatcgatccctgggttagaaagaccccctggagaagggaattgcaacagtggcgagagaggcaggattaggtgagacgctggactagagggccttcgggtctagcaaaggaatagaaaagaccttagccccagagaaagtacagaaaacaatcaaactatctgacaaggttacagaccacagatgactcccagggaagctctaactgactcaatcatcgtcataaaccagggtgcccacagtgtttattacgggaaagatgcattttgagttaaatagtcctttttagataacctggggatttaactgttctttgtcatctttataatgctgtacccaactgaaataaaaccagttaaaaactgggggatttacataagaaatgtgatttttaaaacttaaagagttcctaatctctgaaacagaggtactgatctatgaatagcaacagtctaaaaactaaagtgcaaatgaacaaaatagagcatgtgagtaagacaactcatatttttgttgccctgttttaacatgttgaacaataatctgggtggcgaaattatggaccacttgagttttcctctttgtaaagttttcctctttccatttggtatgaaaaaacagcatatcatttgagaatgaaaacaacgaagtgccccagacgggcagagggcttgtgccaggtgtcttgccaagctgtgctgtctaccgcagagcaagtccgctgtcttctgttaaacctcgggccccaatccagtaccggtgacggccagggtgcaggcccaggaggcccaagcccttggcgtgagaagccgccacgggccgcgctccctggaaggggctgtgagcctggcagccgcttggggctttggaggctgctggggacaaggtccctgagagacgtcatggggaccaagggactgcaggggctgcccaagagaggactccaagggaaggagaaagagatcccgtggaggaggggaaacctgcccaaaccaaccctagactgagcctggaaagactcgagggcttggatgcgggcagaaggacgtcactcccgccaggtcagcggctggggcccaggcaggaccacaccctgggcactcgtttcccggggctcggcagcgcgaccccgggcaggtgggccgcagtgaggcctcagcacggcgctgtcccctccctgccccccgaggacgcctccaggcccccgccagccccgatggccccactccccccacgcgctgacgccgccctcccgcggccccccggtcccgggaccgccagcagacctcaaccaccagctggacgccgcggcctctccgctgacttcccacagcggcgtttggagctggcaccttcactcccacgactttcgtcagccatcgtgtgtcaagggcagtgtgtcagaggacacagaacacgctcaacgagaggaaacgcgctgcccgaggacatctgtgtaaggttcgctcacgaccatgggctgagacgataccttagcaggtgtcgcaccagccgtcactggctgagaccgtaccccagggctacgggagacgcacccaggcaaacgtggaactctaatgcaacacgggagactgttgcaagacagacagcatcctggtgaatcattccttagaaaggtattgaatgggctaagtaccaacaaacccttccaacgccaggctagtcacacatcatcatgttgacttttgactgcgacagctcagcactggctgaggggaaacaggacatcagataggttaggtctgggtaggaaagcattcacgactgccccatcaggaatgatccactcctctaaggacgaaagcttattcatcctatcagttgacccacttccctccctcttttcctttttccttccttccttccatggagccagacactgggctagatgcttagactacagacaagaataagataggagctcacactccagccaggcagactgtcagctagcaaaccctaatgctgcaaggtgataaggagccatgtcagcggcatgcggacagtgcgtcaggaacagacagagggggcatctctttggtggattcactggcaagcaattctccaataaacacttctcaggtgtctcatcgctggggctttggccgtcttttgccatcacccactctcaccctttcggtctgtctctccctctctccagcatctgtttgttcacctctctctctttctccatccatcatctctctgtatccatccgtccaaccacctgcaacattttcaaattgcgtaactttctaggataggttcctgtccttgccgcaggagcagcttagccacccaagaccattttgctaaagtgacagctgacagggagtgagctcctcctcctgtttgctgctgtttgctgctctttgaccccacgggctgcagcctgccaggcttccctgtcccgcactgtctccctggagccgctcctctggagtctgtcgtcaggatgctccccgttgtctgaaatggtgaggaggtgctgcctcgaggcagctgggccgaccagagggctctccaggggcccctgcgcatctcgcgtcctttgccgctaagagtccctaagtgcccttggaccacgggcggccgctgccctttcagtactgggacgagctgcccaggtcaaacgctgagttgagaaatggtggctctggggggtctgttccatgttcttagaggtcactgttgcagctggctgccgttctaataaagactgccaaccctgcactgagagtcacacctgggttacagtcattcatcgttaacatcaagagccaaaacttcgtgagctgcttggactcagaattttgttacgtagcttgcattgtctaatgccttgaagcttctgatctgtttccagctggaaggaaaaggagaccactccactcactggtgagttaatttggcctctgtagcatgaatttctgcaggttccctgatcctctgttcagtataaagccctcctggaatggcagggctttttaggtggcctgcacatcttccgtgggaagaagaaaggaacctggagggaagtgtctagaaacatagctgacccatggttactggtctttctctaccatatccaaacccaagggatgggccacacgcaacagctgaacacaaataacatggcacccggcaccctggcagccccgtggtctttttttttccctatacccctcagcatgtgggaccttaattccaagagcagggattgaccctgaatttgaaggcagagtcttaaccactggaccacctcaagtaagtctctgcctcagtggccttgagtctttatcctgggggcttaactggttttcattagcgctgcttactggtccaacagcactgaatcatggcctctggttctgaagctctggtttacggtctttgagaggctcccgctcctgatctcagagcctgccaggggccccggggtctctgggcatctgataatgctcgcgccgggcgtgccccaagcgcttccaccaggtttctctgagttgccaagtgccccagggtctgctctctgtactaaatgcagacaaagaatcaccttttggttttcagacagacgccaacggcgccattgtgctttagtctctaagtcctgactctttcgcagccccaggctcctctgtgcatcaaagtctccaggcaaggacgctggagtggggtttgctatttccttctccaggggatcttcccgacccagggatcgagcccgagtctcctgtgctgcaagtggcctcctgcacttcaggtggattctctactgactgagccggcagggaagcccctagagcaactatacttcaacttaaaaagaaacagagtggcctggaccaatccactagttgacggtagagatgagactcggatccagattcagattttcggacccccactctttcttcctcccatgatacaggcgaccaaaatcgaaccgtatcttctgcactggaaggtggattctttaccactaagccatccccaggaagccctagatttcaatggacatcatcaaagtgattttaacccaatctaaaatttgatcttttgaggacagcagtggttatctgtttacatccttttatatttttcaatgttttctttgtgattacagtgaccaagctcatataagtagcagccagactacaattataatcagtgagaatcagcacccgagaagcagcctgtcgcggtggctgacggcgcaacacaggtgtcgtcacggctcagccacttcctacagcacgatcttgggcaaggtgctaaatgcatctctgggcctcagtttgttcttctgtaaagtgggattagtgacagtactgcctcacgacgttcttgtgaggattaaaggagtcatgtgtaatatgcttaaggcagtgtgggcctggcaccccgtacgtgccgtatgaatgaataaatcatggagctaatcaacagctagcagacggggcagcactcaggagcttggtttttttaagattttttttcttttcaatgtggaccatgtcttcaaagtctttactgaatttgttacaacactgcttctgttctacattttggcttcttggccgtgaggcatgtgggatcccagatccccaaccagggactgaactctttatccccctgcattggaaggcaaggtctcaaccactggaccaccacagaagttccagatcctggttttaaaggagatacaataatacagcaaagacctcggatcagtgcctggtgcgtaataggcggggtattaattgctacccagaagcagtaaatagtagctgtgccctacttctgtttcgatccgttgtttcccacctttgacctagccttgcagaactctgtggcaacacacttggcttcctctttgccattcttggcgttcagggagaaaaggcccaggccccccgaggccgggggagccctcgcctcatacggtgagacacagagccctagtcccacacacggctgtaagctgggtcccgtcgggagctcttcctcccgcttcactgtcctacaggtgtccccgcacgttctctctttacacgtgagtcttcaaatcttggggctgcctgcaccctctgaaaccttccttcacgtgtacttcttttttgcacaggagacacacgtacaagtgataacgtgaaaagagggtctgaaatcaaccaggcttgtcaccagaggtcattgcactgctgctggcggtcggctaggcattggggcaaagggaaatataccaattaggtgccttcgtccggaaacttaagggtccaaagaaacagccctttcattaggtgttcttggtaaatagagggtttttttgagaagttttggacaagggttaatttatctttgagatcagttcagttcagtcgcgcagtcgtgtccgactctttgcgaccccatgaatcacagcacgccaggcctccctgtccatcaccatctcccggagttcactcaaacttagtccatcgagtctgtgatgccatccagccatctcatcctctgttgtccccttctcctcctgcccccaatccctcccagcaccagagtcttttccaatgagtcaactcttcgcatgaggtggccaaaatactggagtttcaactttagcatcagtccttccaaggaacacccatggctgatctcctttagaatagactggttggatctccttgcagtccaagggactctcaggagtcttctccaacaccacagttcaaaagcatcaattctttggtgctcagctttcttcacagtccaaccctcacatccatacatgaccactggaaaaaccatagccttgactagatggacctttgttggcaaagttatgagataaagttaatcaaatatcataaactgagtttctgtgggatttttgtctctgttataatcgatgttttcttctattctgaatgcaaagtgagcttttttgtataagtctaaaatccgtgttttgctccccaacccatagccacgtgtgtgatgtgaacccacccccctgccaatgtgcaattttcaagttttagtccccatgttggcctaatgggtttaaaaacaaaacccttaatttcagagatctggccttgtaaccttttaggaagggaaaggatttaaatagcccactgatacatttcatagtgtccatcttgcaattctacaagcccagtgtgaatgagcccaattcactgcctgggttaaagaggttagaagatcctgataaagtaagacaaagtacagtgaaaatgcttagcaactgggggcccagcagggttcagaaggcttgcaagagaaaagcactagtaatcatgagataagaaggaagttactgacaacgaccagcggattgataatgccacttattctcgtacaagtctagttaagtgcattcacaaaagaactacacaaagcaacgggtaaaatgaaactggagaaccgcatggaagagagctagccaaatatatatgataaacatgcttcaagttctaggagatgaagataatacatataatgaatagaacagagatttcaactctgacctgtagctgggctgaggcatccaagacacagattcttcccatgaccccaggaaggcagagcgctgggctgagtcaaggtctatgtacttaaagacccagcgaatgaaatgcaatcccaatgaacaagttctgaaccagatggagtgcctcactgggtagttaccttatttgttctttcactcactcactcggtcagtgttatccactcattcatcatctgttgatggagaaggaatcatgcttggccctcaagagctggtgaaatggatcatatttttgaatcaaaagagaatcattttcaccccttggatctgtacagaaccaagtcatgctctcagagtaaggatcaaaacggaacctgatgaatcctaagtcaattctaccaaagcctcctagggggtcatgaaggcagaaaagtctgtctttacgatgcatgcatggagccgagctcagcactcactcttctcatcttttgccttgtttgcaccattattggcatttccactgcctctgcccaggaggactataaatagcaattaaaaacttgggggaaaaggcagtagagtgtctaccttgaaattatcttttaagacaacaaacgtttatctccgatataaaagttggactcaactgtcctctttgtctttttcctgaagaaattaacacacctaagatgaagaaaaagtcggtttcagcatgcatcatttgggctcactgttaaaatacactagaaacaccaattctttctgaacattttgggtgtcgtttcaacatgtttgttttcctagctaagctaaaaatattttcccctggtatttttgaagggacatttagactaaaataaaaataaaaataaatgacatgtttagaaagttatactcatcaaacctggagcagagtacagaaaacggatggaggaagtgaattttaggaccggtgtggtggttttcctattttgactgctctaaatatgtctggaaaaacaaactgaaataaaaaagtacatctccaccctatacaagtgaggaatgaaaaactattcctcatattgagttaaacttagaaataaattaatatatgttatataaatgtccttcctgttactacatagcaaaccctgttcctatgaactataatgattatacagaacctctttttggaccagaccttttgtcatttggtgtattagtaactgagcttagaaattccaggcttctctggtggctcagaaggtaaagaatctgcctgtaatgtggggggagacccaggttcaatccttgggtcgggaagatcccctggagaacgaattggcaacccactccagtactcttgcctggagaatcccatggacggaggagcctggcgggctatagtccatgggtttgcaaagaattggacacaactgagcgactaacacttccacttttttttccagtgatcacagacgtttatttactgtgcagcactgacaatactcagatttgatttacagtttccttttaagtgataaaaatataataaaaattttagcacaaaaagggacattcaacacagggtttcctcccttagataatagaactcttttttaggatgtttatggttttaggaagtccagaaattccctgaaaagagttggctaaatttttttgtgttcatgattttttctggagacaggggatatagcttcagtttaattctccaaggagaaacacaggtatatgattatgtatacacacacatatactcactgaattctttgtaagactcctacagtcaggaccacttgaccctcaccttataggtgataaactgaagcctgtgtgtgtgcttagtcgctcagtcatgtccgactctttgtgaccccatggactgtagcccaccgtgctcctctgtccacgggattctccaggcaataatactgaatgggttgccattcccgtctccatggggtcatcctgacccaaggttggaacctgggtctcctgcattgcaggcagcttctttaccatccgagccaccagggaaacccaagctgaagcctggcggagctaaacggcctgtcccgtgtcatccacgagcccaggctgcatgttttctaaggcagcactcgtctcacaaaaagagaagggacccaaatgagactctgaagcctaaacattactcactgagaagcaagactgggacttaacgtttccagcaggagcttcggcacaacgggtaggtgaggggacggccacgtttactttttatttttgtctccctactcttcttttcctggtgcttgtgggtgtgtctcctgccgattacactctagtctaaaattaagcaccaaatcgtactgttcttttctgagacccagctgaagaatggaacatcactgtcctttgtaagtagcctagagacgggttctgtggccctcctcaaatgtaatcgcatctcttgacatctccagcaaaacactgaacttcgtggcattccactaagaaccacagaacacaccccctttggggggctgcatggccctcgaaatcttagtttccccactgaggatcgaacccgcgccctctggcccttgctgtgaaagtgcagtgttaagcactgggccactggggaagcccctttaaaaatgtctactgtctgccagttcacctaagatatactggatcaccagctgaagtgtaggggtgctgggacattctagagaagtctagaatgaattgtatcttgtcaaaagccacctttactaaatgcaatcttcattctaaaggccaacacgagtggtccttcagtcactctctgaggctcagaaatgattcctggaaaatcaggatgactcatgaaaaaacactagataagaatgtttgaacctaaaagttgtgttacttctcctttgttaagactcaaaagatacatgctaatttgaagactacttatttgtcagatgatgaaaaatacatataaagaaaatatatatttaacattagccttggcagtggtgactatccaaacaccatcatcaaacgagctagccgtgtgctgcactgtctgcaaactcttccacataaattatttccgggagtcatcctcaaactattgaacaaccagcatggtgtggacccaaagccaaccagaacagatttcagccggctgtaaacagctggcacagctgtgctgggcgccccagacgaattccagtcctggttagttcatctgggatccttctgctggagctgaacctgtttcccccatgggattaagaagaaactcagcggtgaggaaactcgagctcagaggtgttcggaggtggccgaggtacagatgaccctatttgtaaagcagaactggagacacagacgtagagaaggaacatacggacaccgagggggcagggagggcggtgtgggatgaactgggaggttgggactgacatccgtacaccgctaagtgtaaacccgaagcctagtgagaggtcaccacatagcgcacagggagctctcctcagtgctccgtggtgacctaaatgggaggaaaatccaaaaacaaagaggggacgcccgtatgcgcagccgaccccctctgcagtgcagtagaaacccagcactgaaagcgcctaggtagggctggttttggtttgtcttctgagtcgtgtctgactctctcgaccccgtggtctgtttccgaccaggctcctctgtccgtgggattctccaggcaggagcactggagcgggttgccatttcctccttcaggggatcttctccagctagggatcgaacccgtgactctcgttctcctgcattacaggcgggttctttactgctgaggcactggggaggcccccaaggcaactgcacctccattaagagagagagagagagagagacggcctggagcaacccaccggctgacggcagagacgagactcaaattcagagttttctgacccttgctcttcccccctcccagggcacaggtgaccaagagtactgccggggaggctcaggggcctgagcccacgccccgcgggatggtgatgccccgtgggatggcgagctgcccggacccctgagatgatctacccagacacgctctcacacctggcaacagggtatctctgctcgaggtttcggtgcggcctgcgcctctcagaacagactgccggggccgctcggtagcacgcgcttcaccggcatctcgaagcctccgaggggaagttctcaccccagagctctgacctgggataaagggagtccagctggctcgggtgacgggaagggggtgaaagctgtgggtggcattttcacgcacagggaactctacacaagcatctcagctccagccaccacctctgtcccctggctgggggcgtccccggacaagccgcgcgggctctgcgcgccagcgtcctgcacggcccacggaccggaggtcgcttcatcagagcagagcgcggcggcggcggcggcaaccggcgctctgaggaccggcgatcacgccgcttgcagacgcgtcagtattttccatgatggtgggacgtggccggagggacgggcctgcttccggtcctctgcagccccttctgacccgcgggagccgcggagtgtgcgacggaggccggggaggccacgcgggcggccgggccgctgggggccaggattttgcaagcttcctgctgcggctcctggccggaagctcgtctgcccagcagcgtcctgcgtgtaggagacgcttgctcaggagatgtttgtggcctgagttagaggtgagcagatgcaatgctgacggagcgagtcagcgaagcagcgagcgagtggtgcgtctggcgagtggccagggcagccgcctgccctcagtccccgggacgctccccgcccgccgcaggcagagcggaccgaacgctgttcctggagtcgctcagtcgcgtccgagtctgtgagctcctgccctgtcgccgccggggccccctgaccagggcttctccaggcgagaatgcccgagtgggctgccacgcgctcctccagggggtcctcccgacccagggactggagccatgtctcacgtctctgcactggcaggcgggttctttaccgatgggccgctggggaaggaaggtgaaggcttaactattcagccaacctttgcacttctcagctcacgcgtctctaccgcgacatgaagaacggcacgtgaacattgaaaaggctgaaacctcgcccggggcctcctataggcacaggtcccctcgaggatgacacgccagggggccctgcagtctctccgaatacctatcctgacccccaccccgccgtgggctgcccaccagcccaggatgccctgtcttgccctcaccaccccactaacagccgctccccggcacccgagaggctggcctggctgcagcgctcaccacctgccccctcagtgttgaccgtggcctggagtctctggtggcgacttcgttagtatcagagaacctagctccaggcttgatggacggatgtttgctgatgaacagtaagactttctggcaagttagactttgcccttcaagaagcttggcttttatgcttctagtgaccctcaggacatagccccggccctggagcgagcagaggcgatggactctcagaggggttggaggagcagggctccgggatgtgtctgagtttccgagcctccccgtctgcagcttggccaatcgccagggaggggaacactctccccacccagaggagttgttgttcagtcactcagtcatgtccgactctttgcaactccacggactgcagcacaccaggcttccctgtccctcaccatctgccagagtttgctcaaactcatgtccattgagtcaatgatgccatccaaccatctcatcctctgcggcccccccttctcctgccctcaatgtttcccaacaacaaggtcttttctaatgtgttggctcttcccatcaggtggccaaagtattggagcttcagcttcagcaccagtccttcagtgaatattcagggttgatctcctttaggatggactggtggatctccttgcagtcggagggactctcaagagtttcttctccaacaccacagttccaagcctcgattcttcagggctcaaccttttttatggtccagctctcacatccgtgcatgactgcgggaataaccatagctttgactagacggagctttgttggcaaagtgatgtctcggctttttaatacactgtctaggtttggcactgctttccttccaaggagcaagccaggaggggacaagggtggaaaacgaacgcactcctgctcggaagaactgccccacccagtccctggcatggggtgtaggaaggacactgtctaaacaacgtcgggtcatcagccgcttcccgacgctcagagtcccggggctgaaggggtgggaacagaattggggcccctgggggcctcctggattgtgtctcctgagccaggggcctcctgataggtcaacaggagaccgggggccttgaaaacacccggcggtgataaaaactaccagctcgcagcaggttgcgctccttaatgacaccgagaaacagacttcaccaatccctcctctctggagatcacaggccacctggccacggccagccgctgagaggaaagcgctccaagattccaagagaccattgttaagaaatgtaaatggccctaaattacaaccagagatggaaatgcatctcggggagggagggacggtctgtaatccagtctcagggttgaatccaaggcccagggagaatgcggatggtttataggctttatagacaagggagaaggttctcagggcgaagaatgtccatttccattagcgattaaaacgcagtttgggaaaacaattacctgcccggggtcctgggaaaggaaagcttcctggtttctctgtcaggaagagcgattgtaaaacaagggctgagaatcgcacaaacaagattttagaactttatccaaacagctgcagttcaccttcgaggagcccagactcactcgggtctgatggatgttgcgacaccaaattcaaggtctccccgcctgctgccaagactcggcccatgggacaaaggaagaacagttgctctcttaatgggagcagaaaacaaaactctctccccccacccaactgcctgctttgttgtgaaattgtcactgtgcctttgaggagagattaaaatccgagccatgtccaatttaaagggcaggttcccaggctgggaagggagaaggtttcaagggagtagggcggggttgagggaagccagttgtatgtgaatttatggaggatttggggatcacagaagtcatgggacttgactcaattaaaacggatggaaaagcacaagtctgtcatttaaaaataatagtaaagcagcaagaatattctggctggttctctgcttccagaacctctgcttgggaacctgcttgggaacctctgaacaggtttccctgaagcacagcgtgggcgccaagcaacagttttcacctactttcccgcacttgatacacacacatttcccaacggagagcaagaaggaatggtccacccaccaaagaacgtttcctgagagccagggaggtgctcagccaagttactgcagttgggaaagaaaaagcttccagttttcaaggcagaagagtctagagagcgtcaaatagatgataagaaagcggcctggtttggcagccttgccagagtctcagacacacactggacactgcagctttccaggaggcagccctggacgcctccagagcccgagtctcatctcacctcacaccaggctctgaagaggaacccctccacacgctccctcctggtgccatttgcaaaatgaggcaagaagggtgaagccagaaaagttcgagtcccatagctctggtgtccagagggccgcctgctgggtggaggaggagagaggatcttaggacggaaggcatctctcagccaggggcttgactgcttccaggtctcaatgttactgttgatacttgcacggacatcgaccttgatagctcaagtcaagagatttctatcagatcggcccctcctcctttctaagaggagggtgacagcagtgtctgacctacaggctagaagatggagcgagtgcccgtgaaggcgtgctgcgctttgaatggcacccggcacgtggggtgctcaacagatattaaatctcatcactggcatggtgccattttctgactattccttcatttagccatttctgtatactgatacatatcaaagagatattttgatgagtatttaatactcccttcactcacgaaagaactccaggatattcccgtgcccccgaccccggcgagcattaactcagtttatggcaacctatggtatctatcatttaagcacaattttggatatgagttttaaaaccttacatttctacaacacttctttcttttcccttcttctcccttccaaagactccagagatccctagcagagattttattaacccctgacagggtacggaaaataagttttagttttaggacgataaaggccacttaaaaggttcaaactccagcaccctcaccaaatcatgaaggacagaaaagagagaaattgaagtcccgcccataaagcagaagcccttggcgttgctaggaattcttgtcctttagcaaaacctgcagcaggaatcccttccccttcatgaaacaaaacgaaccatgagttgctcctgagacagcggctcctgggacagtatttacccccctggagcaggggcggaggcgagctgcccgcccaccccgctgggcttggtctccatggcgtttccactttcccaggcctaccagggcaacgtgagtgatttgccaccagccagcaagtggccaggctgctccgagtgggaactctgcctccaagaagcagtggggaccacactgcagaggaaggagaacccctccatcccccgcagaccccgactggccatgggcctccatcccctaagcccccctgcccccaggcctcaggcccctacagcagctgctccactgggcagacacaccctctttcccattacagttacaacagaaactataagcactaaatccacccggcgtccctgtgggctcccacaggccaacactctcacagcacccgtggcaacttgtccgtgcacagacgctttgattcactgtggtccaaggggctccgcgtgcctttgaaaataaatactaaacgctgagagggtgctgtttcactttgcactctcatagctgacgatagaaggctccaaatgagacgctttcaggggtattgagcacaaagagtgagcaagacgactcattctcgcctctgcaggcagagaggaaaaggctctcgcctcttttggcgaggggttactaattcggaggatgccagttttagagcctgtctcagtttgacttgtaaatgaaaggtggaaccttgccaaaattaccccgccgggtgcctgctggcccttgtctatgttggggtggggcagaagttcaccaaaatcattagaaagttcaggaaacaaggaggtgaagcaaacaagtagaaggtggtgaggctccctaacagagcctccccggcacccgatgcagctgatccttccggtcctcaggacagagcaggatgccccagctttccttacagaaaggctcccgggctttcctgtgtcagtcaccccgggggctgacggaaatatgagtccttctgtgagtcgggcctctgagctctgtattaaaatctcctgagccagtatttcagaaccactgtctttcaggagagcagagagaaataactgatgcgaagagctggtaactttttactggaatagaagtaggcatttcttctaaagcttcttactacagagcaaccacgtgcagaacacccgtcctgtgtcaccttcaccgtcatcccatcaaatccatcgcacagccctgcagggacaatcagagaacccagcagctcagggaagttcaggggagctctgtgccctgagacacacagctggtacacggttcacccgatggcgaggccaggcgcatccgaccacacctagccccggcgcggcctcgatccccatattcatcatgggggcggggccttgatttccatattcatcctgggggcggggccttgattcccatattcatcctgggggcggggcctttattcccatattcatcctgggggcggggccttgagtcccatattcatcatgggggcggggccttgatttccatatccatcctgggggcggggcctttacttccatattcatcacgggggcggggcctttatttccatattcatcctgggggcggggccttgactcccatattcatcctgggggcggggccttgattcccatattcatcctggggggactgggctggcaggcctccctcttgccgggagcctcgggcacttgctggttaggaaccgtctctctctccaccatcccaggacagccctccatatcttctgtatttctcaattcccttcttcccttttaccctgctttgctttcatcctctctcccttccttatagcagttagtcctcagtcttcttttaaattactttttattggagtaaggttgcctaacaatggagggtcagtttctgcctcacaacaagatgaatcagctatacgtataggtgatatatttctttgtttttggctgctctgggtctttgctgctgtccgagggctctctagtcgtggtgtgcggcttccctctgcagagcgcaggctccatacttgcagcttgcaggttcggtagtttggcccaaggccccggttgtcccaaggcatgtgggatcttcccagagcagaggacgaacacacgaccccagtattccaaggcggattcttaaccactggaccacaagggaagccccaattcttcccttcttttggatttccttcccatttaggtcaccacagagcgagtcctcagccttgctcgcaccatcgctcgcaccatcactcgcacactcgcaccatcgctcgcaccatcactcgcacattcgcacaatcactcgcacaattgctcacaccatcagtcacacaatcgctcgcaccatcgctcacaccatcactcgcaccatcgctcgcacaatcacttgcacactcgcaccatcgctcgcaccatcgctcacacaatcacacagtcgctcacaccatcacccgcacaatcgctcgcaccatcagtcacacaatcgctcacaccatcacacaccatcactcgcacaatcgcttgcaccatcagtcacacaatcactcgcaccatcacacacaatcacacaatcacttgcaccatcactcgcaccattgctcgcacaatcactcacacaatcactcagattctggctcccaccgacagagtctggtgggattcagtctgggcatcagcctacaacacactcctgggtgattttagggtgcagctggggtggaggcgggtggccttactccaggctgccacatacaaccggcagaacccagaaacccgcctgaacacacttgtggaggtcctctggccactgtcctccacaaagcaccatgaaaatgcaggaggtgacctcgggtgaccttcagccacacctgctgagaaaacgcccaactacaccagctgaccacatgggcgcggatcccgtccctggacaggctgcctcatcccgtctccctggagggactcggggaaagcctgcatggctcccctggggcctggggggcggggggaggtggtgacggaagggcagccacctcggcctccctgctgattaaacagctggaccgagagcagctgtgcagactctcctgcaagacggccaccgtaaagacgcctacacggctggcgtcatggcccaccctgcaacccgctcccagctgcattacacacacacctgaggaggacaggaaaccttccgcgcagctctgctccgtgtcggcctcctcaaggacatcttttggaccaacacaacctcatgttcccacttcgggcatctgtctaagtcgtctctttcggaccccatggactgcagcccaccaggctcctctggccatggaatcctctgggcatgaatactggagtgggtagcctttcccttctccaggggatcttcccaacccagggatcaaacctgggtctccctcactgcaggcagattctttatggtctgagcctccagggaagccaaggatgaggacaactcgtttaaagaattgccagtgtaatatggatgcagcccaccaggggtgaacgcgctgggaagggagcagcagcaaagctttggggtcttctgagaccacggaggtcacggtactgccgcggaaagcacgtgttatacgtgacgcacagctcagtacatgcaggtcaccaatgaatgggcaaatccacgacctgttgaaggtgtggctcaaacccactgtttgccatggaccagacgtgctagggaaggataacaagtgtgaggctttccacgcggagttagaccagtcagccgctcagagagcaaaggggcagaccattccatccacctctctcttggctgaaggccaagaccaagcagaggagggcagaggtggggtgtctgctcctccaggccccccagtgaggaagctgggcccccgcaggagaggctgatgagcgacctgcccacctcaccaggctccaagtcagctgagcaccacccaggtcccgggggggccctgggctcaggatgctgttccccacaagaggggcccatgcggccaccagctcagctgtgcccacagcgacctcggagagctgaagctgcctctacaagagaggaatttcaaagacactgggaactaacgcagccctgagaaaggagctgaagacgcaggctggcctctgagtggagacaagtgcggcaggggctcagaggaaggggaagccgggacgctgccctttgaacgtggggggtgggggggggccttgaaaagcaacctgtctgaggactcagtgtggacgcctgtgatcacacagctggaagagtaaacacttgcccggagagaagccctctgctctcttctccttcctgtctcttgtgcactttaagcggtgtgatttattttaccaagaataacagaatatgcctctcttcttgcctgactttgagctgccttggatggcagctcgccaaagtgcaccaatactccattccagggggtgagagcctgcctggaccctgcccctcagacatgccccatctctgggaccacacaggcggccagcacagaggaagaaaggcactctgaagacatcagatggatctgctcctgaaagctttgactccaacctgatggatgtgcgtagcggatgactgggccaggcggaagcagaccagtcagctgcaggccagtggactggaggccagcctcggccgccgccacgccaaccctggctgcgtaaccgaggcaatcttgggaataagcgtgtgatgtcatcttgctgtcattgttctcaaaccatcctggtctcctccctttctttgttcagaccttgcgctcgccaagctacctctgaagcccgtctggtttctgaagaaaacctgcctggagagagagtacgggctgggacagcaaagcaccagctgtctcatttacaaatgaacatactggccttttggttgagcacgagtccagtgggctgttaacgggagtcagtccctaagagtcagatctgtccttgaggaatcaacaaatcaggtctccgggctaccaggatgaagttcagaccttggacgatgctggattcaacaagtaatgccccctcaggggtctcctggaggtcacactcttaatcctcctgtagtaatggcccaacagacagtggaaaggcttccgcagctgcttcttgaatcactgcactttgtcttgcatgaagactgtatgtagactcagaaatgacctgtgtttcacgggcctgggtgctgtgcacggcttctgtggaagccgcgagcatctgctctgctccttaggtatatggaaaactttgtggctggtagaaattccaatctgtttaatccttcagccatgcctgattctggtataatcagactgaaaggcagtcgaaaaggttgccagaaggagttatgagagatgcttcctcttgaagaacacaggatttaaacatcaatgcagtatactaatgcatatatgaggcatttagaaggacagtatcaacgaccctatatgcaaggcagcaaaagagacgcagatgtaaagaacagacttttggactatgagggagaagaagagggtgagatgatttgagagcatagcactgaaacatgtatattaccatatgtaaaacagacgaccgagtttcatgcatgaggcagggcacccaaagccggtgctctgggacaaccgggagggaaggggtggggggggcaggatggggacatgtgcacccgtgcgtagttcatgtacgggaaaaccactacaatactgtaaactaatcatcctccaattaaaaaattaattaataaaaaaagaacacagaatttagtcggggagatataaactaaagtgatgaaacatactcaaagttgcaaataaaaatagagctcaaatggatagagcaatgagccagaattggctggagttgaactcaaagggcttatttttaagaaagagcagttaagtgtcatgatgacaaggatgggtcttggaccaaacagacttgggttcaaatacttgactgtgacctcataacggacaggtaagattaagcagtatgggacaaagtgcctgacgcacgggacatggtcaaggaaaggttgttgaaaaacaccgaccgtggggacctccctggtggcccggtggttaagactctgcaatgcagtgacacggcgggacccctgctcagggaatgaagaccccttacactgtggggcaacgaagccctcaccgcaaccaccgagccctcatgccacaaccagagaccctgcatgcctcagctgagacctgccacagccaaataaacacctttttctaaatactaaaaagagaaaaatatcacaaggaagggaaaggttgagagacaacacgcgggcggctcacactcgctctgcgccaggcgctgggccgcacgctttactgcatcaagccacatcaccgtctcaacaacagtgaggccgggactgtcagcgaccccaccgactgaggagcaagacccggcacagagaagccaagtgacgtgcccaaggtcgacacagccaggaagcgcagcgctgggcgctgaagccaggcgacctaggccccagagcttggagcgtgagccactttgtctttttccattgcgcatgccacattgcttctctttgaaccagatatattaccaaacaaatcgtcaaaacagcttggatttttaggatgaatatttaaaatattataaatcccttccttgtaggggagtggtctgttggaacagtttctgctgatcactcaggaatctgtccaagacagtgatgtgtacagactatttttgtctgttaatatacagtaccatataaacactgactcaaccaaagagcctgaacaataaattatcactagcccaagtgctaaaatagcacttgattttctctctgcctgagcatgctatctatttatactctgcttatttctgtggaggttcaaagtgctttatccacatttcatcatagccatagttatgtcgatttactgcctttattacacacacgtgactaatgtacccgaccctacgatgcttaatatttactacaggagtctcagtttccaactagggtttctattgaaagaattacggactgtctttcatttataattagtggacatttgccgtcaattaaaagaatagcgttttgttgtttctcttttcgataaattcatctcatttacgatctgaccgtgtgtgctgtgttgcgcttagtcgctcagtcatgtctgactctttgcaaccccatggactgtagcccgccgggttcccctgtcaacaggaattctccaggcaagaacactggaatgggttgccatgccctcttccaggggatcttcccaaccctgggatcgaaccaaggcctcctgcactgtgggtggattttttaccctctgagccgccagggaagcccatgatttgaccgtgcttgcctcttaatattaactgcaaatcgtgttcattataaattgtatttttttcttttctttacaattcaacttatggctgaccttgaaccagaacacatttgtccgtttggaatcataatacagggatttccctagcagtccatcggctaagactccgggctcccaatgcagggagcccaggtttgtttggtccctggtcaaggaactagtccatggctgccgtccatggggtcacgaagagtcggacacgactgagcgacttcactttcactcttcactttcatgcactggagaaggaaatggcagcccactccagtgttcttgcctggagaatcccagggaagggggagcctggtgggctgccgtctatgggatcgcacagagtcggacacgactgaagcgacttagcagcaaggaactagatcccacgtgccatgactgaaaagagaaaaagatcccatgtgccacaactaggacttttcaggttgcttagcctattggcacagaggtattttcaaattcgacctgcaccctttcagttttagtacccatgggcaaaaacataaataaataaataaatttaggtgttgaaacagaataaggaaaagaactccaaagaatgatttcctcgactagccagagggcagatgagaccccaaactctggcatgtataaattgggaaaaactaggtttgtgtattgtctgaagataatacagctcaaggttcagaagcatgccttagtgctggacacagggaaagaaataaaaggagaattgcctttggtgttcccatcagtgacaaagaaaacaagcccaaacgcaccgcctgaggctggagcactctgttttccttcgtcctcctcttctgtgaatatccatcttcgttattgaaaacagaaactccagccttaaacgtttcctgatttttgcaaaaaggatattataccaacagtcccttttcaagaactggcagttatcacttcactctacacaagttcctgaagttttcaccttgaccaggcatatcgtctgccaatgtgactttaggaagagaagacagatgcagaagatatgagtcataaattcccacagaatcaacaacgatgttggagggatttttaggaaaaaagtcattgattccaggaatgtttttgtatcctagttatactgatatggtgagccgttaacaaggtcaagggcctagtctgtagccaatattctcattcaaagacgcttggagacacagctggatcgatgcgcagagttctccgagagaacctctgggcttctatacattccgacctctcttcccggataactgggtgcctctgttatttctctttcaggtctcagaatcattatcatttcctccagaaagtctttcataaaactgggtcagggcttctccagtccggggcttaagaacccgctttgcaacgcaggggaccctggttcgatccctgatccggcagggatcacgagagctcgggactaagccaagcaccgcaaccactgagcgcatgcactgcagcttctgaaggccgcgcgcctcacagcccgccctccgaaacaggaggagccggcgcagcccaactcgagagcagccccaatctctgcaactaggaagagccctcgcagcaacaaagacccagcacagccaaatcaatcaatcaaccaaccaaactgggtcagatggccgttccgtgaacacagccccggtgccaatcccattttactgggttggaaatgccaggatcaccttcagacaaagacgagatctcaggaaagaggtgcgggaaaggagggcgggaaggacacagagaagccagcggcggcgggggctgggaagggccggctggggcgctgctcttaccgccccggggctgccctgcgcgtccgctaggaggcggcggaaacctctgggagcaaaaccaggccacacctagagtgagttcaacgaataaaaatgacactgcttgaatgctttcaaaagcagatttcactcctgtgttttcctttgttctttatctcaagaaaataaacagtggtatggtggggtccaagtcgggcccagccccgaaggcggcggtggctctggacggctggctgcactgggccccacgcccactgggttggttcgcacgatggaaacagcagaatcgagcgggcttgggaggcttccatcagcgtcgtaagcctgcgttcaaagaccagacccacgtgcggcacagaagagttaacgatgatgacggtggaatgtgctggaaatcggcaagagcgaacaatggaaacgtgttttctgttatacctttctctttttttttcaaaattatctatttcaaaagcaaaacagactctctgagaagttaattcaccggcgccaccgtatctcaggcagaaggatacatgggcatagcaggctctctggagccagacccagtttgagcgctggttcccaaacttcctggagagttacttcagtgggtagagcctgtttccttatcatctttcagaattgtgtgcggttaagagaaaacataagtacaagtgtttaatacagaggtgggggtttaacaaggaatgtgatcaccactacctcctacactgtcagaaatagaattaaaatatcggtttagaaattatgaacgcccctaagctgaactttcccaggtggcactagtgggaaagaacctgcccaccagtgcaggagacacaggagattcagatttgatccctgggtcgggaagagcccctgggggagggcatggcagcccactccagtcctcttgcctagagaatcccatggacagaggagcctggtgggctacagtccagggggtctcaaagagttggacacgactgaagtgacaagttgaactgaagtttaactgtatatgtgacatgtgtagaagtctgaataagtaaattagaatgcaaactagaaaatgcttaaacataagagagcaaatctttaagcaatttaatacccattttactataaacacttaatatgtgtttctcaactaattttaatgtgtattttgtctaactaatcattttaattcacaatgctcacaattactaaattatagtaacagaacagtatattgtatatccttccagaaaatgtgcatacatgcatatatgtatgtttctaatttttctcaactatgaaatcatatgctccatacagacctcaacttttccactctacaataattgggcgtcttcctgtgtgactttatgtctatcacgtttttttaaacagttgcatttcagttcaaaacaatttacattcatttagccagtcttctatgtggatatttcttttttttccccactttttttttttttggctttttctgcaaaaacaaaataatgccacaatggacgtccttacatatatgtaggaaagtctcctagaaatgaaactgagtcaaagggtacgtaaagttagtattttcaaaatcaaggtcaaattgccctcccaaaattcacaagactcttaacaacatggaaaaaaaaacaaacaaaaacactagatttcttcacacttgcccaattctctcttgtcccagagatgaaggtacaatctgaagccataatattaagtgatttcactattcaccgttaaattaatgatagttccctgcagttctcaaaaatgtaaacaacgcgagaggtcctagctcaggcaaatcaagttcctccagccaagaaggaggtgtgagaagagctctccaacgacagaccaaatgattcacagacaaacgcgttcaaggttcctcacgttgactgagggtttctgtgtgctcgactcagcactaaatcctttccatacattgtctcactttagggcctgtgtatttgcgagtgtttataagcccaataaaagcctcacatattgcctgatgagccctgggaaaatgagaagcggccttcacctctggccaaacagcagtgatgataccaaagcctgctcttggcttcccctcccccgtctctcctccaaggaaaagcaggtgctgtttccaaccagcagttgccggccagccctctatcagccccaagtccccatcagtggccatttccgacatgactgataagtttctcaatgacccctgggcttggggaaaccctcaaatatcgtctgaatcattaagacacatacgtatgtctgtgtagttgtgtggtcggatgtgttttgttgtattgaactctgtaaaaaattagtcagagaagcggtctaggtttgtttttttttttaaagggggttgaattaaccagaacacctcactcttctagctaacagaaccatttactgtacttgagataaactggggtttaccatattactcacccctgatcacaccatcaaaagttcacattcttttctttacatttactgtcaaactaagcaaaaatatagatgcccacctcctaggataaaaaagagctatttcccatcatttcccatggtccaaatcccaagtaagtccacacttgataaagatcccctagctaattggacaccattgagatgagagcaattaattcactagttttgaatgaaaagcttgactaaatgattctgtgccatactatatattctctgggacttgctaatataaatgtagctccgtatttatttttttaattttctaaaatcttttcagaagttaggtttttctttgcattttcttttttgcaagatatttgctttacaatattgtgctggtttctgccaacatgagtcagccacaggcgtacacatgtccggtacatatgtgcacatgtgtcccctccctcttgaacctgcctcccacctcccaccccgccccacccgctaggtcgtcaccgagcactgggttgagtccccggagtcacaagcagccccctggccgtgtttcacatacggccacgtgtgtgcttcgtgctcctctctcagtccgccctgcgctcgcccccccccccactgtgtccgcaggcctgctcgctatgcctgcgtgtccacggctaccctgcagacaggcccatcagtgccgcctctccacacacacgcgcgaacacgccatgtttgtcttcctctttctgactcacttcactctgtacaacagggttagggttcatctacctcattgggactgactcaaatacgttccgttttaaagctgaggaaccctccactgcacatatgtaccacaatttctgcatccacgcttccgtcgatggacgtctaggctgcttccatgtcctggcagaagtcaggtttttgagactcaatttacgtttccgcccccagttgagaaggttgcccccccaagcacaaggacatgttccacaaaacactggaagccagacccacaccaaagtcctgtgggagtgaaggctctgcccaccagagcccacgtctcagcagagcccacgtctcaccagagcccacgtctcaccagagcccacgtctcaccagggtccacatctcaccagagtccacatctcagcagagcccacatctcagcagagcccacgtctcagcagagcccacgtctcaccagagcccacgtctcaccagagtccacgtctcaccagagcccacgtctcagcagagcccacgtctcaccagagcccacgtctcaccagagcccacgtctcaccagagcccacgtctcaccagagcccacgtctcaccagagcccacgtctcaccagagcccacgtctcaccagagcccacgtctcaccagagcccacgtctcaccagagtccacgtctcaccagagtccacgtctcagcagagcccacatctcaccagagtccacatctcagcagagcccacgtctcaccagagtccacatctcagcagagcccacgtctcaccagagcccacgtctcaccagagcccacgtctcaccagagcccacatctcaccagagcccacgtctcagcagagcccacgtctcaccagagtccacatctcagcagagcccacgtctcaccagagcccacatctcaccagagtccacgtctcagcagagcccacgtctcaccagagtccacatctcagcagagcccacgtctcaccagagcccacgtctcaccagagcccacgtctcaccagagcccacatctcaccagagcccacgtctcagcagagcccacgtctcaccagagtccacatctcagcagagcccacgtctcaccagagtccacatctcagcagagcccacgtctcaccagagcccacgtctcaccagagcccacgtctcaccagagcccacatctcaccagagcccacgtctcagcagagcccacgtctcaccagagtccacatctcagcagagcccacgtctcaccagagcccacatctcaccagagtccacgtctcagcagagcccacgtctcaccagagtccacatctcagcagagcccacgtctcaccagagcccacgtctcaccagagcccacgtctcaccagagcccacatctcaccagagcccacgtctcagcagagcccacgtctcaccagagtccacatctcagcagagcccacgtctcaccagagcccacatctcaccagagtccacatctcagcagagcccacatctcaccagagtccacatctcagcagagcccacgtctcaccagagcccacatctcagcagagcccacgtctcaccagagcccacgtctcaccagagtccacgtctcaccagagcccacgtctcaccagagtccacatctcagcagagcccacatctcaccagagtccacatctcagcagagcccacgtctcaccagagtccacatctcagcagagcccacgtctcaccagagtccacgtctcagcagagcccacgtctcaccagagtccacgtctcagcagagcccacgtctcaccagagcccacgtctcagcagagcccacgtctcaccagagcccacgtctcaccagagcccacgtctcagcagagcccacatctcaccagagcccacgtctcaccagagcccacgtctcaccagagcccacgtctcaccagggtccacatctcaccagagtccacatctcagcagagcccacatctcaccagagcccacgtctcaccagagtccacatctcagcagagcccacatctcagcagagcccacgtctcaccagagcccacgtctcaccagagcccacatctcaccagagtccacatctcagcagagcccacgtctcaccagagtccacatctcagcagagcccacgtctcaccagagcccacgtctcaccagagtccacgtctcaccagagcccacgtctcaccagagcccacgtctcagcagagcccacgtctcaccagagtccacatctcagcagagcccacgtctcaccagagtccacatctcagcagagcccacgtctcaccagagtccacgtctcagcagagcccacgtctcaccagagtccacgtctcagcagagcccacgtctcaccagagcccacgtctcagcagagcccacgtctcaccagagcccacgtctcaccagagcccacgtctcagcagagcccacatctcaccagagcccacgtctcaccagagcccacgtctcaccagagcccacgtctcaccagagcccacgtctcaccagggtccacatctcaccagagtccacatctcagcagagcccacatctcaccagagcccacgtctcaccagagtccacgtctcagcagagcccacgtctcaccagagcccacgtctcaccagagcccacgtctcaccagagcccacgtctcaccagagtccacatctcagcagagcccacgtctcaccagagcccacgtctcagcagagcccacgtctcagcagagcccacatctcaccagagtccacatctcagcagagtccacatctcaccagagtccacatctcagcagagcccacatctcaccagagcccacgtctcaccagagtccacatctcagcagagcccacatctcaccagagcccacgtctcaccagagcccacgtctcagcagagcccacgtctcaccagagcccacgtctcagcagagcccacgtctcaccagagcccacgtctcaccagagcccacgtctcaccagagcccacgtctcaccagagcccgcgtctcaccagagcccgcggtctcagcagagcccgcgtctcagcagagcccgcgtctcaccagagcccgcgtctcaccagagcccacatctcaccttccagaaagcaggaacgcaactcttgcaccacccctccccctgccaggggagaaggctttctcccagctccctttctgaaggtctagccaccggggatggttttctaagctctagaaaccctggggctgccccagcaagtgaagctgcttgaagaatctgtcttttagtcactatcaatcccctgggtcggtctgtgacaggcctgtctttgactgtatctcactttctaggcagaagatgtttcatgaggttccaggatattcagggacagaccatttgtattcagtagtgtcaaacgaaaaagtgccttttgcgcgtgtgaaatccatcagactctgtttaagcatctgagacgggtttcagggaaatcagtcattccgggcatccgtgcagagcagtggcttatggaaggagtgaaaccagccctgaagccaggataagccctgaagggtcctgatgcatgaagtggagactccagagtcagtgccagggagtaagggctcaggctagcttatttgcaaagcttaagagagcagtgcatttggacaggctgttgtatgtaactgattaatctcctaccaaatagaagtaaataaacgttgaagtgagtatgaatttttttttcaaaaaaaggatcttttatttcttttgcattattaataaaataacctagatcagctactgtggagaatagtatggaaattccttaaaaagctaaaaatagagttaccacttgatagcaatcccactcctggacacatagctattagagaaaagcataatctgagtagatacatgagcccgtgttcatcacactatttccaacagccaggacatggtagcaacctaaatgttcgtcaacagatgaatggtttaagaagatgtggtacacacacacactggaatattactcagccataaaaagagcaaagtaatgccacttgcagcaacatgaacagacctagagactgtcatgctgagtgaagccaagtcagacagagaaggacaaatatcacaatattgcttatatgtgaaatcaaaaaaaaaaaatggtatcaaggaacgtatttacaaaacagaaatggagttacagatatagaaagcaactttatggttaccagagggaaagcaggggagggataaactgggaaacggagattgacatacaggcactgaacagatgagtaatgaggaccactagagagcacagggaactactccggactctaacgacctttatgggaagaaagtctggaaaagaggggctacacgtctgcatagacccgattcactgagctgtacagcagaaagcaacacaacactgtaattaactacgctcttgtgtttaaaaaaaaaaaccctaaaaatgcagtcgctatagtttgagcacctccttccttcatctgacgctgctctgatttcgtagagaataagacaggcgtggcctctgctctcaagaagctgaaggagcaagcatgccaggccctgactgtaaagatccagaggatgaaagtaggggcagcggaggggaaggactggccggtcagctgctctgagcaggggccatctaaacagaggcttgaaaggccaggagaccagtcccaggacgatcgggaggactccaggccaggcagaggtcacaggcagtgaaaggctcacctcctgagtggtgggcgcgccgtgtcagagcgtcaggaatcagcccctgtaacttgtgagccgtgggcttcagtgtgaggtgatcggggtgaaacgcttggtaaatcaggatgaggagtcgggggaatcatcctaagcctgacaagaggtactgggagtgatcagatgaactgaaacccaactcttctgcaaagaccccaacctagaggggcccccagagacagcggggacaggagcagctgaagcgcccccgtccccggacacccctctcgcacacgtgggaagtgcagagggcaacgggctcctggggcgacagcagcctgtgaccccaggcccacagccacgacaccagcccccgtttagtcaagagtggttcaggggtgaagaatctgcctgctagtgcaggagatgcgggctcgacccctggggcgggaagattcccctggagaaggacatggcaactcactccagtatttttgctggcaaaattccctggactgaggagcctggtgggctacagtgcctggggtcgcaaaaagagtcagacacgacgagcaactaaacaacagcaaagccagcagaagaccttccctgctcctgccccaacttctagcttctcgctcctccccaggaacgtggccccagtcccatctctgtgtttagacatacagaagaatttgggcccccaagtaccagcagaccccatacttctgctaactgttacttttgggaacaaaaatacctctgaaatccttatcacatttcatccaagaaacgaggctcatccactctgcagccgtctataaatatgtttcatgacacgaagaaaactcctgaatattagcaccccgtgatgaatgtcctcatcaaccattaaagacttatttttagcagagccaaccactaagttctgagccaaatagaatgtcatgtgttacccgagaagcacatgtcagtgtggtcatcgaccagctaatccggggtgaggtgatctctggaagatgcttcttctgagaggagagggtacttcagtcatcagtgccattcagaagcttagatatattgacctaactagaacatggacttactaacgccaaacatttccattgtgttcagtgaaataacattactagatattttttattatgtacactggcaaaaaagtgccctaatttttttcaacttacatttccatactcgtatggtggccagacatcaaatgcgtggtcctaaaatgatgggatcagggacttccctggtgggccagtggttaagaatccgcctgccgacgcggggggcctgacttcgacccctaatccagggagatcccacatgccctggagcaacggagctccacggaccacggcttctgagcctgggttccaccccccggagccacaaccgcggacgcccgacggcccagagcccctctccccaagagacgccaccgcggtgaggggccaagccctgtcacgacacagcggcccccactcgctgcaattctagaaaatccctcgcagcaagaaggcctgcaacagccaaaaataaacagataataaatttaaaatgatcaacactggcctattttatctctgaaagctcgaaagccccatgcctgcactatggcagcccagccggtctgttgtgaaaaaccgtatgtatagaaaccacagacgatagtaggggagggaaataaggaaggaaaagtcactgcttcaccctcttttccggaatcactgctcacaattgctcacatctggcgtgcctcaatggtaatcatttgcaaggttcaaaaatattgaaccttgaaagtgaaataaagagctttatcttcaaaagaaaaattaaagacccagagcagaacccttgggaccatttttattacacctggataatggcaggtattactactctatgcagaagtatgtttttatgaataagctaacacacccttaggctgcaaagttgtgctttaggatatataacatgttgattcagatacaaaataaaatactgtttgcatggtaggtttttaatgaaaagtctaaaaacacatctatttaacaaacctctaatttttataaagggggcctaaaaaagcctgtttttcttttttttaaatctaactatgggtggtctcacacctagaagtggtaaaagaatcctttgtcagaccacgtcttaatttttggtatggaaaatgtggtcaccgtaattataagccagagaaagtaaagagctgaaaaagttctatgcaggaggggagtaataattcgttagcattcaataaaactgtaatttaaccagcttttaggtatgtaataatcagcttgaaaattacagcacttgacaattttctattttaccttttggctatttgtcgaagtggcttattccctccatgaaacttatgctccatgaaaacaaatgcagcgtttcccacacccctagaaacacccccaccagacctggtacacggcttgttttttgtgttcaatgaaccacaaagaatgtttcaggaacaaccccaggaaaatagggtaagaggaaatcaatcataacttgtttcgaagctattctcttaggcttccagatatttcaaatatatcctttaaaaagtttcagttatggaaaaagttcatttgtgcagactttaaatagttttggccaagaaaggagtcaatattaattaacacaggaggagggagaaagattagctgtgtaactcagtcacttagttcccaagacctttttcctggaaggcatccctcgggactgaaatacacacatattacaatacacactggaggaagagacgcaatgagcctgtttctccctctatgtggtctttttggacttgctatgaaaagaccaaagccaagtgaggctatggaaaattaatgagaggtgagcatttcatgccgttaagatgcttagctacacaggcagcaagagagcaccacatggcccttttcacagagggtaaaacccaaaggcctttccgcaacgctggggtagagacgaacctgaaattcccaacacctggaaacgttatagctgctggtcgtctccgcttggagttcctatcattctcagatttcttaattccacgttacaccaaacgttcctcttaattgttgttgctgctgttcggtggctaagtcgtgtccagctctttgcgaccccatggactgcagcacaccaggcttccctgtccttccccgtctcctggagtttgctcagactcatgtccattgattcagtggtgccatccagtcatctcaccctctgtcgcccccttctcctccggccctcagtcttcaatatacatatgataatcagtcttacaaatcctaatgttttagcatcttaacctgcacctcccagactgcacctcagaagaagaagtagccgagaacaattttcgaaacctatcttcttcccgtgttttgatttcttagaacagaaaataggatgatgatgtcaaaccaagtgagaaaagtaacatttccctgaaagctatggctaagtcaactacacttcaataaaataaggtttttttttttagcatttttttttattttactttacaattctgtattggttttgccatacattgacatgaatccaccaccggtgtacatgcgttcccaaacatgaacccccctcccagccccctccccacaacatctctctgggtcatccccttgtaccagccccaagcatgccgtatcctgattcttacatgatattatacatgtttcaatgccattctcccaaatcatctcaccctctccctctccctctgagtccaaaagtccgctatatacatctgtgtctgttttgctgtctcgcatacagggtcatcattgccatctttctaaattccatatatatgtgttagtatactgtattggtgtttttctttctggcttacttcactctgtataatcggctccagtttcatccatctcatcagaactgattcaaatgtattctttttaatggctgagtaatattccattgtgtatatgtaccacagctttcttatccattcatctgctgatggacatctaggttgtttccatgtcctggctattataaacagtgctgcgatgaacactggggtacatgtgtctctttcaattctggtttcctcggtgtgtatgcccagcagtgggattgctgggtcataaggcagttctatttgcaattttttaaggaatctccacactgttctccatagtggctgtactagtttgcattcccaccaacagtgtaggagggttcccttctctccacaccctctccagcatttattgcttgcagatttttggatcgcagacattctgactggtgtaaagtggtacctcattgtggttttgatttgcatttctctaataatgagtgatgttgagcatcttttcatgtgtttgttagccatccgtatgtcttctttggagaaatgtctatttagttttttggcccattttttgattgggtcgtttatttttctggaattgagctgcataagttgcttgtatatttttgagattagttgtttgtcagttgcttcatttgctattattttctcccattcggaaggctgtcttttcactttgcttatattttcctttgttgtgcagaagcttttaattttaattagatcccatttgtttatttttgcttttatttccagaattctgggaggtggatcatagaggatcctgctgtggtttatgtcggagagtgttttgcctatgttctcctctaggagttttatagtttctggtcttacatttaaaaaagaaagatttggcttggtgacacgtggctaccaaacccataagggctgaaattgacttgaatatgttccctaagggctggcttcttccaagggtgctgcagggaccaagagctttgtcttcagagttcgcccttggctcaagccccaggctagcccttcggagccgtgccattgtccacagaccactcattttcttggagcttcggggcccttgcctataaatgcttgtagcagcctgtggtctttcggactcagatagagcaaggcaagcccagcaccgtgactgtcacgtggtaaggactcaggaggtgggggctctcgtggtcccaccttctggtctgtcctgcctgatgcagggcgggtacacctagaagccacactgtggccgcacctcctgcagagctcccgcctcggaggagcgcgccgggcggacaccggcgctgcaggggcggccttccgcagctcccacccgggggcagaggcggccggcgggtggcgcgctctgttccagctttcagcggccttctccagccagcaccgccggcctggggttccaatgaaagtcatgcggagagttgggaggcgtccgggagacgcttcttttaaagtggggctggggcggaaaacagatgggaccagagaggactcgggctaagctggcctgccctccccagcccgggacgggcctttctccacggaaaatgtctgctttttaatactggggcataaggtggattttgagtttttcagattatttggtcttcattttgtgagaaagtcattgtgtttgccctcccaacaaagtcagttcaggttgaggaaaggagagcagtgatgctgaaggaaggagggtcagcctgaaaccctatcctcctgcatccgcaccaacagatgcacacagacacacacacggacacccaaacacacagacacacacagagacacagcgagagagacacagccacacacggacacaaacacacagaaacgcacacagacacacacacggacacccaaacacacagacacacacgagacacagtgagagagacacagccacacacggacacaaacacacagaaacgcacacagacacacacacggacacaaacacagagacacacacaggcacacggacacacaaacacacagacacacacagagacacagcgagagagacacagccacacgtggacccaaacacacagacatacaggcaagcacagagacacacaaacatacccagacataaacacacagaaacgcacacagacacacggacacacagacacacacaggcacacagacacacacacacagacgcacagacatacccagacacacacactgagacagagacacacgctgatagatacagacatacagagaaacgcgcacgcacacgcacacacacacgtgtgcacacatgcacacgcacgcacacacgtgtgcacacacgcacacgcacgcacacacgcacatgcacgcacggccgagctggactcgtcccacgtgctctgtgctgtgggcagcgtcttctctctcctccccttttttatcaagaagatcccaatactggcaaccacaccccaggtaaacagggtagtaagaaccacaggcaaaacagtagcagcaggcgacacctcccccggcggcccagcagaagcacctttcaagaaagcaggtctgcaagaagctttccaggcccggtgcagactcgttactgctcacaaagcgcagggctcactgtcttcagacaagttcttgttttgtttgtttgggtttatttttgccttcgttctgcaggaagcctcacagatatgacagggtgatttaattcggtacaaacctcgcctccctaattcttagaatgtagatagataccactaccggtattcttagagttacacagcctcccacaccaaacctagcgaagtagaacccacatttcattggaatccctacttttagttatttgcaggtttttcttgacgacacaggaaaccaaatatgaggcagtgttgtagatattgataaatgggtttctagaacgtgttcagtggctgggagaacaatgcctgatttctgtcccaaaagggagacaacgactagccctgaccccctgtaggggagagggagactccagtgcccctcttctcaggtgaacggattcacgacaacagactctgggagacacctctgtgaaggccctggagaaagtttctcctgtgtcccagcagccagtcaagagccagagatgacagaaaattccacgtgctggaaagaaagtcagtttgaaggaaggggtgacatttgcctggaagtctgaatccactgagctctaagcccgtttggagtaagtcaggcaccttctgcatgaagcgggcagtgagcctcccacgctgcagaggagccaagggcaaggccggggcctcttccttaaaggcttctgctcctcttgctgcactgagattcagcacacggaccaagctcagccttggcggaactcccccaactcgcagtctctctgcaccttgagctgataacaagtcatcagaaaagttcaatgttttcagccaatgctgaggtttaaggcaaagccagattccagaaggtccttcaaaaaacactaaccagttcatccttacaaccctccttctcccaccaccaccaacaggatgtaccagctgggataagactggaacaaataacttttaaatgcctgagggcatgctcagttgctcggtcatgtctgactctttgcaaccctgtggactgtagcccaccaggcgcctctgtccgtgggattgcccaggcaagaacaacaggggtggattgccatttccttctccagggggtcttcccaaggaacaaacccatgtctcctgcttggcaggtgggattctttacccctgagctacctggaaagcccctatccagcttttaaataagtttctttaaaaaggaaattaatttattcattcattcccgtaactttcatagagcactgggcggcacaatccgctgacaagtaactgtactaagatttagaagacctcgctctaccaggccagccaccccaggccgttttcctaaccttcctgtgcctcagtttatttccccctaaaatgggagcctgggcaagatggtttccaaggttacactgaaccttagcatctggggcctctgtgcttctgctcagcctactctgtaagacactgctgggtgcagcagagaggcagccgtgccaagacgtggttccgactcatcctgttcacagtcactgcctggttctacttccaaacttccatcacaggctctttcgactcagcatcaaatttctatcttcctttaaatgtacgcctctcgttgacgtatagagattcttagtccgacagggccccctcctagttgcacaggattgggctaagtatctttccactcacctgcacatcacagatccgcggcctgtgtttcgtggcagcaggagttctctcaacaaggatgccttccgcctgaaccgccacattcttggggagattctagaatatggggtgactcctgatccatgcggcgtgccctgctcccaatgtgcatccgtccccctctcctgcctgaaaaacaaacactctggcctgcagcctgcagtcctgggataagagccctggtttgaaatctgtgcgagtcgagcccgtccatcatgcaaacaggctgccctcaggcagaacagctttgctcatcaatcaagcttcagggaagtgggtggtttgagtgtggggcccactttgccgtgaccaagctcctatgaaaacgtctgagtgtgaatgaaaaaaactcaacagtctgctttccgcgtccgctgcaagagggccaagacaaggttttatttaaaaataactccctcctctttcctgaaagctgaaagcaagcacatgagcttaaaaagaattcctctttcaagatttactagtgtctcagatcagaaaatacagctgtcagcgatgtcacgtgcagagcaagggaaatattgggggacgtttctcaagtattcagaacttagaaatgacctatttctggttttttaaaaaagcctcctgagaagacatctcgtgattgtgaggtattcagatggcagttagcaagtggagcaaatgaatgtatctgaggctaagacgggacaccgggccgtgctgtgctccgtccctcggtcgtgtccaactctgtgaccccatggactgtcgcccaccaggctcctctgtccaaggcattttcccagcaagaatactggagtgggttgccatctcctcctccaggagatcttcccacaccaaggactgaactcgtgtcccctgcattggcagacgggtacttcatcactgagccaccagtgacgcccaagacgggctacgacacgagtccctgcaaaaagagacgcgggtcctgggagagtcgggctcctgccgcagggctgggaacagcctgactgtgatctgagacggagcaagccaggtaaactccccaagtcttaagataagaaaagatatttctatgcatattatacctacgcacgtattatatgtatataatatatatttacatataatcaataattatatgtacagtccatcctaaaggaaatcaaccctgggtattcatcggaaggactgatgctgaagctgaagctccaatattttggccacctgatgcgaagaactgactcattggaaaagaccctgaggctgggaaagattgaaggcaggaggagaaggggacgacagaggatgagatggttggatggcatcaccgactagatgaacacgagtttgagcaagctccaggagttggtggacagggaagcctggcgtgttgcagtccatggggtcacagagagtcgtacaggacttagtgactgaacaccagtacataagtataaataaaatggggccaattataccttcaactcataaaattctgagcactaagacattacaagcaaactttctataccgtaaacacaatacaaccgtcaagcattattataataaaaagcgtatttcttcaaatacacgttacgctgttcagaattatttgatttctagtctagcttccgtcctttaaagaatgagtttttaattaattcagtttatacatatttcctgtctgaactcttcacattttcgaagctcctacacaagtgactgaagaatacaatcttaaaataacctgagaaataacagaaatagaatagatagatgatttaaaaagcatttaccctttgccccagcaacccttctggtaatgtctcctgcccacattctaactgactgatgacaaaggttatctgttaaagcgttatccgtaagaccaaacgactggaaatagccaggtacccatcagtaagggtggcaacgaaacgtggagatgatagctgcatagtggcctccagggaagccttccctgggcagacccttccctctggccctgggctggaccctgtgacctgcttgggtaaaggaacattagcgaacatgctgcaaggagagccctcacaagcctttttatatcggggcctaattcctctccgcgtttggaacccagtcaccacgggaagaagcctgtgctagtctcccggacaccaggagccagcggcggtgggctctcccaccaacacgcaagtgaagccgtgctgggccatcgaggcccagtcaagccgccagacggccccattcataccagtaaatccatgaaagaaaaactacccagcagaacccagtccaacagcccaccgaagagctgtgaataaagaaaaccgttgctttagtttaagccgccaagttacggagcagcttgttacccagtgacagataatggatccaccacaatattctgccaaacaatgaaatactatgaaggcagcagctaacccatgaagagaggaaaaggatgcactgacaggctaaggctccaagacacactgatcaatgcacaggccaccggagaacaaggctgcccttgatgtagaaacaggaagatctaggtaaataaataaatgtgtgtgtgtatatacacacacgtattttgcatgaaaacagcctgtatacatactcaagaaattaacctagtcacctgttttcagggaataagcgggtgaactgcgaggatggggacaaggtgagagtgaaactcatcaataaaaatgtttctaaattgtttcagtatgagaaccacatgaacctatgacctattcagaaatcagtatttttaaagtaaaatatcagactaatccaaggtagaaatgacaaagatcgaaacagcagactttcaaattcttataattctagcatggtgtcatccgtctcaagtgttcctttgaaccagaataaccctctctctgtaatgcacaaggtgatttgtaagcacagctttatcttccctgctagacggtaaacgcgttgggaggagggactgtgcctcacgcatttctgtttcttctgaaactggcaagaaccatgcaaggcacagagcacgttcttcataaacggttgttgaaagaaacagacaacattctgacatccccaaaggtctcccgttagtgccgatacgtcctcgaagatcctcagcagcctagcctcccacctgcacacaagctccacacaccagctctggagaaaatggcgggcatgcgctgtactttgggcgggctcccctcatccccttgccctgaaccactgggcagggtaaacctacaagctaaatttgaaggccgtgaaaggagaaaaagaaaaacaaactcccccatttagaaagaaaacaacaacacccatagaggaagtctagaaaaagaaagatcttttattatttctcatcagtaacaaatttcacttctgtggtcgagtgagcagcaacctgcagcagactaaccctgcaaagccaggtccagacaagccagccgtggggatgggaagaccccaggcctccagagaagctggcgctcaggccactgtgaagggtttgtctgttccagtctaccgtttccaggaaagagaaggccacagctttctgcaaagcccgattcagggtttgacagttctcactggagagcatcccttacttggaacctgtagctctcctcctggccctcgcctctgccccttctgatatgggttcgctgtttccggtctgaccctatgaaagcgtcacttcttcaaagaggaggtccgagtcacccccgtccctgtgttcacaccctcctctccagatgtgctcggccacggccttcccaacccctggggcctcctggactgcaccctccgaccgcatcctgccgtggccttggtgcctgcactccgccagcacaagccaagctaaaagcggtgagcaggcaacagaaggcgggccgcctgggctgaagggcacacaccgtcgtcccgagagagccagggcagcaacgtctccctcccgtcagctctcaccatctctgcttctcccacgtgaagtaattctaacccctgggcttccctccctgatttcacgtcccaggttgtggattcacttcactgttctcggcagcgctgcactttccccacagctacgacacctgggactttgtcacggtggggaatcatcttcgaaggttccgccaggtaaagaaagccagaaagtgaggctgacaagccaacatgcctctatgcttctgccaagagagcaacaagtgctggttatgcgccagctgtgcgcaaggaggtgagtcagacgctgtcaagagtaagacatcacctctgccgcttaagagggacacgggtgagatggcattcacaaagggaacgtaggcttggatgtgcagagctcactgacgggccaggcaggtgtgcagctgtcagcccaggtagaacagaggcagtggaaatggcaaagaaggaggaaatgagcgagaccctcagaagaagactgaggctgattcctgagcacagaggaaaaacgcgtggcacaggatgctttccaggtttcaggtcttgaaagaaggaaacttgtaccactcctcacagaggcagaagggagctggctatcctgaggacaccctgaatttgggggaaaaaaagaggaaatttaatactcaacttcagatgggcaactacaagtgggaacataggaagtcatgaaaataaaagcctttgtggaggagcaaagacacagagctgagcgcagaagaattgatgcttttgaactgtggtgttggagaagactcttgagagtcccttggactgcaaggagatccagccagtccatcctaaaggagactggtcctgggtgtttattggaaggactgatgctgaagctgaaactccaatactttggccagctgatgcgaagagttgactcattggaaaagactctgatgctgggagggattgggggcaggaggagaaggggacgaccgagggtgagatggctggatggcatcaccaactcgatggacgtgagtttgagtgaactctgggagttggtgatggacagggaggtccagcgtgctgtgattcatgtggccgcaaagagtcggacacgactgagcaactgaactgaactgaactgaattgaaagacacagaggaagaggagggctcagaggcaggggcagggcgggcttgaccatcttagtagagaccccagcaggtgagtgtgggcctggccccagtaggagctccacgaacgtgttgtaactggagaggggagagtaacgtggtcgtcagaaaagtgagaagaaaaccagcaacagagcccagtcccatcaaaggagaagaactcaaaggcggtcaagggcgaacacagagtgcagggctgcatgacttcctgcagacccagcgccatgctaagggtccaggctgcctggtccccaacagcggctggtggtccagcccatggcccagaggaccacagagcctgcacagacccccagggtggcactgccttacttggcatgaaaaaaatatccctgggatttataatattttcaatttactatttgcactgtgtcgatttgactatgagatctgggaacttcgaatggaagtctgaaaggaagcgggatgttgcggcttgcaaggactccaccagcactgtttactctaatctcaactttggagagaggaaaactggaatgagaagtacctttatttcttaaaaaaataaataaataaataaaagactaacattcaaagaccccggcagttgattaaacatccaaaggaaggttcttgattaaagggactcttgacaagaagcactgaaggtctaagtaaatatccccatctggtctggggtgcgccacctggcccttcacccgcctgctctgtgataggtttcaaccagccgattctgctttatttgtaccagtgcagaggccacctgtcctggactaggctctcccatgaaacaaagtgaacagttcttatttccgtgctgcccaaatgatttttttaaacacaaagcactcccttccaccttgagcagatttaagaaatgctgactctgaagagcaggtataaacaaggcaatcttttgtttatgaagactgctaacgacccactcctagaaggacccctcctgtccccggcactggtgaattaatccatccacactctttagctcatttccctggctgttacgagctaaactggaaaaaaaaaatgttttacaagggggacgtggtgtatgtgtgctaaaaacaggcaccacacaaatccagacacagaagcgaaaaagaattccaggtgcagggacagtgtaagcgcaaagggaggagaagggaggcgcgtggaggggggcggtggccggcgtggagggggcgcagcggagggcgtgggctgaggacttgcctccaggaaggctgggcgcggggtggtactctgcgacagaggccggcctctctccgggagccgggctccggggaaggtctgagccaggagcagaaaggtcgcagggtgccctgcagcgccgggagagggaggggcccacggagagctgacaccacggggacccccggccccaggcccccggtctcgctggcggccgcaggctggaggccccgggtctcctgggatcagtgtccgtttggaccccgcgtcccgcagtcctcaaaagctctagcgtgtccttttcgccagtagactgtcgccctggtaaaaggcgccgggtccctgcaggcaaggctgggagacaggttaagagtataaattcgggggagtgcagcagggtccttcctcaaggggagccagcctcgccttcattcaaggggccctggggctctaaattggcccagctttgagaactgactgacagtgcatgatgctccgtttttatgattcaggtctgacttctggttctgacctcgacctgctctgcttacacagatcaagtaagccttcaggagcctgcccacagatgtcacgtctaggaacccggtgaggacagagatggaagcggaggaaacgaggcgcaagggcggggcgtgggcgaagggaaggcggcggacgacggcgggaaggaggccaaagccggctggacgaggggccagaggccggtgcgccagggcgagggggcgtctggcagaggaagagacaccgtaggaaacggtggggagccccccggggcctgtgagcagcagagagcggtgtgggatggagacggggaggaaggtcagagcccaggggttctggaaccacgcgcacacaggcaggaacgttcagggggtggagatgtgaccggaggcgcagacagcagaaggcccgagccggtgtctggatttacccggagggagtggagagggcagctacggagctggtctgcgggcagctcagggcgagggcagggagaacaccgcttgtgcaacagacgcaaggtctagagtttcaggagagatgtttcctgaggttccgactgctccagcagagtacgccagcgcggctctggatgtcctcagaaactggtgaggaagacagctgtttcatgagaatgatggaaacagacgaccccctggagcagtgggaggggcggtggggatggggagcagggagcgaggcagtggagcgacaggcagattatcggcttaaaaccgtgcggaagaggcggtagccaaaaggagcagcagagctaaagaccattttccccaggatctggacatcctaagtacacttgcggacactgaaggggaggtagggaagattctgcaaggttctggaaggttctggaagtctggggagccctggaagggcctggcctattgattggagcacagacgtaagtctgtaggaggaacttcacgaaggcctcagggttatgaccccctggtaataaccttggtggtgagtaaggggctcagtgtggactcaggccctagagagaacagtcttttattcttttcaaaatagtgaatgcaaaattagcattgcatctgtattatcttatcgttggcttcaaatttcattcctgtgttatgctttcccagtgtgtttggttaaaatttgcttagctggtaacattctcatcagtaaggagtctgcagccagcagtctgcacccgcaatgttcccttaaatgcatactgctcttttgtgaatgagacacaaagaaactgaatttctaactaatgcaagatactggattcacagataatattttatctgggtttcagttcagtcatatgtctccaaacgagcttatcttgcccgtaagccttctgcttccctctgttcatttttccccctgccattcagagcgggtggcgggttcttgtttcttgccattcatttctgcagggctccgtggaatagatcggtggtttcttgcttagcccgactctgaaggccgggccccgcctgtcactccctgtagcccacacgctctgtcctcactcgcggtctcgctgttctccgacccagttccgaactgccagctcttctctttacttctctccactcggccccaaacatcaagtcccaggctcagacgcttctctgtccagaaactgcctctcgggagcgccctgtcctgtgtgctctgcccagcccttcagctctggtcttctgcacccacggcagtctctgcaggtggtatcctctgggtgcgagcgtgctcagccactcagtcgtgcccgactctttgcgaccccatggactgtcgcctgccaggctcctctctccacgggattctccgggtgaagagactggagtgggttgccatttctccctccagggtaccttcccggctgagggatggagcctgggtctcctgcattggccggcagattcttcaccaccgtgccactggcattctttacttccagttttaagctgactgtacattttaagcggtcaccttaattcttcactaatactctttttggccgaacactggagctttggccaccccttatggtccacgtcttagggagtatggcctgcctgtggtctttaccgcgtgcagtgaaatcagtaaatgacgagaacgatggtgctgacaggtagagtcttcttctcctgaacgtaaaatgtcgcggcacatggtgttactctgacttggctacaatctctgcctctccctggctaacgacacagctgccaacacaacagagccacgcggctcaaggatgcgcttccgtcgtgagaaccagggggcagactgtcctcaatcctcctgcccccacacagggttttttatcagaaacgcaagcagtttactctggggtggggcggattttgatgactgtggcagtagaacactgcctttccacttgccctctgttgttacagaagccctaaaaattctgactgtgacgggtttgaagattatgagctactcaaaggaaaggaggaaagggaagaaggcatgatggtttcagcgggcggagggtttcgggggtcccattttagagatcagaaaaccaaggccagagagtgagtctcagggtgacaaggagtcacaagacacaacggggacccaggtaccttaggccttatcaaatatagatcactgtctttataagatagatggaaaagtatggaaaggacctgcaagagaggtgggtgggagagaaagaatatacggaaaagtcagacttgttaacatccatgtcccatagtttatacattgttcctgattaggactaagtgacctaaattcctatacacagtgaaagggaaaagcaggtaaacagactcatgctgactgtatatgttactttccctccccaaactataaaggttggtttcagattcccacataaaaatgcacgtaaaaacggtaaagcaggcaaatctgttactcttgcagccggttagagtgactcgggtgcttttcttggcaaatatttaaatgtcacacgccagcatcacgtgctcagtactatttcagtcgatatgatttgtgtcaaagtcacctgaactgggtaattgtctgatcttagtatcaccagcaggccctcacacaacagccctcactactaataaactcgcaagaaagacttcagtttaggaaactagcattttcttagaaaaggggaaaaaaaaagcagttctcagtaaaagataaaccacagagctactgtgttcagtcaagttgtacatataaaaccacacacacactctctctctctctcaaaataaaatttaggctctgtctaatccacaaaggtgagtaaatacagaattaaggcattagaaccagaatcctgctcatgactctcctggatattgagactacactgaaaaatggtggaactgccttctagaccacctcgtgtgttctccacgcaattctaataaccataattatcgaggtggttctcctggtgggacaacaagggttgacagtcattcgcacagaacagagtggtcagagttctctcagagacagaatctatttctaccttggagtacaaggaggcttcaggccctcagggactcaaggacccaaaatgagttcagattaaaaaactgaaaggtggggggggggtgctgggggaaagctttctgtcaggtggagagccatcagcagaaaaatcagggatgaaaaccgctgaaataggtcaacggccgtgaggctgcacccaaagggacgtgggaggcagctacatcgcctgcaagtaccgcgtctctcttggggaaggcaagaacacgggtgagctggaaggcagagggacggagggagggggggagaggagcaagggcagcggcagggcgcagagctcggcctccaggcgagggtgggccgcgccagggcccaggctcgggggacaggcagcgaggagggaaggggatggagccgggccccacctcggaggctgaggcacagccacagcccagctcaggagacaggctgcggggtccagcccaccctcctgcctgcaggcttctctaacaccatggggacagtcgtcctcaaagcactggaactgtaagcggttgcgggagctgtcacagagcccgtgttgccattcacccacgtgtgtattgtgaacgcagaggttcagaaattgtgtgtgatacacttcaccttttgagttctgccaaaacttgtacagaaaaaaaactaaagccaagagggaaatttctcgctgccatgctaaccaaatgctgtctgcttaaaaaagaaaccctaagcatgtgactttgaagatggagaagaggcgcaaggactctagaggctggaaaaagtggagaaggcatcctcctcagccctccctacttcatttgaacccagtgagatctgcattgtatgtatgacctctagaatgtaaggtaataaagttatgttgtttaaagccaaaatacagatcctaaacataaaataacaccttcagctataagattcattttcaccaatatttcttcaccagaacccagcttgagaaaaccagcatcccctcttcctgaattctctcctgtgtgttgctgtgatggtcttgcatggctccatgttagtcttgaagtttggggcttcgaagggacccccatctcctacccttccctgcaattagcagcactgcgtctcggggtcagcgctgtctcagccacgtgcaaggacacaccaaaaacctacctcctactctgctggtgaaaacagaaattgctataccatttagaaagcgatctggaagtgtctatccaaaatcaagaatgccatcactgatgaagtcatcgcatgtccctttaactacagcactgtctggacagaatcaaccaaggaccagcatgcagtgatgaaaaagacagccgggaagagtttcagcaatgtatcactgtaaagtgagaaaagaacaagatgcagagaggaacatatgacttaatctggtttttatgaagcaatgagagaaatcacatgtttctgttatatccagatgtttaccataattacatgtgttaaagaggagcgaagtacaggagcataacacacaaggctggtacactggcaacatgggggagagggattagggtggagggaagggacggagtgggggaaagaaagaagtgaaaatgaaagaagagagcaaccagaaaaaccacatggatgccacgagctcatttataggaaatcgtgtgtgcttaggcacacatctataaacagaaaatgatagttttatttcaaggtgttgagatgttttaaaatataattcttttactttgctccttatatatatattttaaaacatacaccctcttggattgtttacagaatcagaaaaaaagcattgaggtaaatatgaaaagtcccatgcacagcagtacaggttcccagagaggaagcaactagagagagaaggttgcaatgtcagggttggggtcgggctgggaagggtctctctgccaggaaagacagaacaacttctaagctggggatcaaagtcgttttggtaggactttataagggacttcttttcttcctgttgctcttctctattttccagattttctgcaaaaaccatgttttgcttttgcagtcagaaccaaacatacatatatatgtatatatatataattttaaaaattatgccatgaacctttttaagtgggtgggggtagtaatcaacacaatatacattttagtatattatgcagtggcccctgaaacagagatggaaagtcatttatgggactttcctggtggcgcgatggataagaatccgcctgccagtgcgggggacaagggtttgatccctgtccgagaagagtccacacagccgggagccactcagcctgtgcacacagccgcggaggcccacgcctgagcctgtgctcctgtgagaagcccgcaccgccacgggcagcccggctcgccgcaactagagaaggccctcgcagagcactgcggaccagtgcagccagagacaaatgcagttgttctaaaacgtcatttacgaaggaatagtgtcagtgagagctgatgacggcccccagttaagaagtggtggcaatgggaaggaacacagtgggccttgaaggtttcctaaataaaaaagatgaataagcgaaacagtgaggaaaagctgcttagtctcaactggcgttattcagtcgctgagccatgtccgactcttcagcagcccccaaggactgcaggctaccaggctcctctctgggattctcggggcaagaatgttgcagtgggtcgccgcttccttctccagggcattttcttgactcagggattgaactggtatctcctgcactggcagggggttcttactgcggagccaccagggaagctgctctgtgaagtttatatggatgcccacaaaacacagccagatgccagtcagctgatttaatccaaagttagagacccataattgctgtagaggccagtccatttaatcaaatcacgcccctgaatgcagccacatctcggaatccacatccagggaaagtgcaaaacccaagggaaagaccgaagtgctagaaaccacagaagatcgactgtgctgataggcggatgtggagcgctgcccccacccctaaaaagaaagccatcgacaagcactggatccggcaaacactggggttttgtagatcaaataaaaatactagtattgcaaggggactcctggcttgcatccattttaggctgtagccaacttaatgtttctgatcaatgttaggagaaataaattttaagttttctatccagttgtggtttgcctgtttctaaaagctggcacgttctaagaaccccttttcattcgaagtgtttgagaaggtgacagcacatggcttccaaagaccttccagcttcaaaatcctctggtgcgagaggagacgtcatgccaactgccagacttgacgctttctctctctcagatgttccaaaggaggtagtttactaaataagccctgtttatgctttctggcattcctgaagcagatgtaatataactgaaagcaaacaattttagtgatgcgaattcatgcattgccatctgaacaccatgtaatcacgaaactaaaatgtttacccaataatcaaagaccgaggcaaaggaaccaaaaggcattttgtgagacaaagcactggccagtacatccaataaaaggatttatggagagttagcctgaaatggctcgtgaggaaaagtcaccgtgacttggtttctaatcacacaaaaagactgccccgctattattctaaatggtcagaaaaaaaccgggcaggaatcggactggttgtcacagagaaccgggttcttccagcagacttccagggtaagctctccagaaggcaagcaacatcctagcctcagaagagccccaccactcacctacgacattcctctacaagctaaaccacctctgatggtaaagcacactccttccactcttcacacgggtggtgcgttcccttccacctccctgccttccaggcagctgccccctggtctcagggtggctcttaatcacctatagccctctcttcctccacgtctggctgaaagcccacctctcctccgtctgacaccaaccagcaggggtccttcacctgatctgaaccctctccaggtctgtgcgctcagttaacatgaaggactgggattctctggtggtccagtggctaagactccacgctcccaaagcagggccccagggcccatccctggtcaggaactagatcccacatgctgtgacgaagagttcccgtgccaggaggaaagatcccgcaagtgagaccaggcaccgccgagtgcagacacacctaaacactaaagcacacaaaaatccaagtactggcaagctgctttatgggacgagccccagggcacaattccccctggatctcctaaaaccctgaaaatcccacagagcacagtgaggaggaattcccttccttcctctccatcatcccctcctcctttcaatccagggtttatccaacatctactccaagcaaagccccattcaaggtttcttcatgtaccattcacacagccccctctcagaccttgcgagaaatcatggactcactcccagcccagctctgctcctctccaactttctcgtctgcggttgtgtttggttcttctctcctgctcaacccaacatgcaaccaactgcctgctatcacctatctggctcttcctctttaattcctctgccttgatatctctcctaaacaccaaagcctcttcattactgttctccctgcaaccgggtgactatccccatgcgtgagctgcttgataacggcaagaatctgacactttatgagattcccgtctatataacacaacctgagttctcttgtttgacattaaagaacatcctaattattacagcttatcttccaggcgcacaggacttctgatttcagatgccaagcaactggactcctataggtttttgtttgtgccatttccactgtgtgaaatggccttcacccaacttttgatctaaagtcctacttttcaaacctagctaacatgccagccaactcccccagatccaaactgattgttcttcctcctgaactttcttagatttagttgttacgactccaagactgcttctagatcataaaatcctggagggaagagactgtatctgtctttgcattccaacaccgtggccaaccacgggaggactcctttggcaccagcaggggtggaggtgccagccctggcaagtgagtattctggccatcattggcttccgagtgttccgaggaactccaggccgcaagcacacaggacacactgggtgggccgaaaagttcatcagtttcccgcacgactttacctaccgtacatgttcctacagagtactctggcaggagatgtagaagccagccagctagtgaaccacggagcgtatgaggtgtctttttaaagacctacctcacctactgggcttccccggtggctcagcagtaaagaattgggctgcaatgcagaagacatgggttcgatcccagggtcgggaagatcccctggaggagggcatagcaacccactccagcactcttgcctggagaaccccacggacagaggagcctggcgggctacagttcacagggttgcaaagagttggacacgactgaagtgacttagcatacatgcacacaccttgcctcctatgccagaccaccaaatataccattatattgggcttcctggggcctcatggtaaagaatttgcctgctaatgcaagagacgtgggtcccacccctggatcaggaagatctcctggaggaggaaacggcaatccattccagcatttttgtcttggaaatcccatggacagaggagcctggcaggccctagtccatggggtcacaaaaaaatcagacacgacttagcaactaaacaatagaaacacaccactacatgaagacgcagccggttgtgaaaatcaacaggcactcacagacctccctccatcactggatacactagaggtaagagcataggtttcaaaagcacccaagaagacaaggctcagaactctgaaaattggggctattcttttcttacaggatagagagtgggttgatatggaaaataaaggcatttgtctcttaatggtaataatcctcaaactcatcactttaagttcaactacaacaagcacttaaggccaggaaaggagctgagaaaacatgaacgtctgggaaaactaaacattctttcacctgcgaagttgtgctggtggatgaaagctcttgtaagggataatcatttttttttatttgaagactggtatttgggtagcagctgagcaaagtttcctgaagcgctcaaggtgagctatgccataaggtgaccacatgtccctgcttatacggaagacccccagtcgccatctgtgatccttgcagaattattaatagaaccgcccccttctctctcacagctgcccccatctgaatgataaattagatgaccactctgtctgtgagtgcacagtcagaatacagtggcccgtccatacaaggtaagacggtttgctctaaaacaccaggggggtgatgccaagaatagggcagaatccaggcttcctgacaccaaacccaggctctatctcagggaacatatttcctctaagttgtttcctcatcaattaatcacgaaaaaacactttgggaaatggtaaagatgcacaaccgtggtttctgcaaaccagcactcaccattcagctgaggagactaagcacatccatgttcgctaattaagccgggccagacagcttcatcatctggtgccaactatgcggttccaacgacagtttcaaaaggggttagagggagaaaaaaccccgatgggctgtggacttcagggaaagtttctgggagatgatggaacctgaatggatcttaaaaggggaaataaaggaagaaaggagaaaagaaaaaggatatttttcctttaaaaaaaatggcagaggaataaagcactcaggtgatgctctgagcactctgacgctatagacagaagatgcagaaacaagacgaaaccatcaccagctgtccatgcgcccttccccagagctccctgtgcctgaaggcgcagcagccggcagcgtggggcgtctggcaggcagacgagctctggctgctagatgacggtgttcctccccgtgatgtggtgagaaaacagtggccactttgacttttatcctcagcttgtccgctgactggccgtgtgtctgtgagcaagtggtttcatcagttttgagcctcaattcccttcagtaaagcactgcggctggatgaagtgatctctaaggacctttcaatttctggtcctttacagccaatcctaggctgtatttagttttagtttagtttaattgataattctagatttagctcaatagtggatgtgagtgttcatttctggcaaaatggtaaacactgggctgatcctatggatccctttttactacaaagatatgaaatgctcaagaaaatcacagtgctgaccctggaaggaaagaagcaagggagggaagcatgggctccggaaatgaagagaaaccgaagcctggtctttagaaagaagtcgacgccttggtgcccaagtgagtttcagacccacaccaatgcccttggggatctggggacaatgattagattctaacgcccatgaagagatgtggcttcgtcctgatgaggtggagggagggaggtggaactgggcccttttcataaatcttacagtcaccccatccatgaaaaagggacaaagaccatgcccctcttcaagatgaagggtggacaactgccttagatccagagaccagactgcctctgagaaatcaaaaccccaaacacgaatcacattcagttgtaacaccagaatttacattatctgtgtatctgggtgtaggacaagaaatgaacataaacacaattccaggactatgagaacacctttgatcactgaaagaaacaagtatgtgaccattacattgggacaatttcacaactcaggattcacaagattcccactgaaaaaatatctcggtgaagatgaacttgccaacacacacactctgagaattcactaccacaaggaccagtcataaagataactttttaactaaaatctaagaaccggaaaaatactacaatctgaaatgggctatgaaataagatttcttaaaagtattaaaatgataaaagactaaaaaacataatggaataataggagtgaattaaaaaagagaaagaaaatagcagacttgaaaaagaacaaaatggaactcctaaaaataacttaatggaaaagttagacagtagagtggcacaaatatagaattagtgaactggaaaaagagaattaaggaaatcaaccaaaatgtaacacaggatttccaaggaaaaatggagaactgaacacaccatatctaacacctcagtaactaacacaccacatcggaaacctcagtacaactagggaaagtgaccatttcaaagacataagcccagaaggacaggagagccagtgaagggtaacagcaataagatttccagcaataagacggaaggcaggtagacacgtggtgacagaaccagcagagccaaggcggcagaaccaaaactgggaataaggcaagttaggagcggagtcacaggctcagcaggcctgggaacagacagcaccagctgccttggaaccggggagggaggagaggggaggcctggctgagcgaggaggtgggaacgaacgttgcttaagaaccagttcagcttccctggcggcttagacggtaaggaatccgcctgcagggcaggagacgtgggttcagtccctgggtcgggaagatccccgggagaaggaaagggctgccggggcagttattcttccccggagaatcccgtggacaggagagccaagagtcggacgtgactaagcaagcaatggtttcactcttctacccccaggcctcaggcccctttcccagctccaccctgctgggcagcagtctttctcccaactggtgaaacgggaggtgtgggctccagagacatggttcctggactgaggaatatcacacgtcacacagaacagaaagcacgcacgctgaatgctggccctcgtctcactcggctcagcactcagccctgaaacgggcagagcttcacctcccagagcggagtttggaagggtgctccctggagagtctgatgtcgctgtaggttcttcggtaggagactttaggggctgccaggcgggattccccaacaaatggcattaacatattatcctatggtaatgctcaaagtcgataagccccacacaccctcagagcttccaaagaaatgattagctcttcacccttcaagatgaccaaccactcaaggattacgaggcatgcaaggaagcctctacaggatagacgaagtgcaaagcaagcacacaaacaggcaacatggaggagatggaggctgtgaagggagaagacaatttccaaagagagtattatttttttcagaagactgagagaatgtcacacatgaaaacagaacagaatgcttaaaaaaacactcaactatttatagatgaaaagaggaaatttaaaacaataacagaaatgaaaacccaacagacaggttggaaattgaagaaatcatcctccaaaagagcaaaagataaagagatagaaaacaggaggaaatcagagggctggtctagaaagtacaacacccacataacaggagttttagaaagaaaggcttgccaccaaaagtggattcgacagcttgaaagaacgtgctgattgctcagtacaatagacgaaaacagactcccacagaggaaagtgattgtgaaatttagaatactggggaaaggaaaagattctacatagtcccagggaaaaggaaaaaaaggtcaggtacaaagcattaagaaccagaatggtttccccttccagcagcaacactgggagggagcatgcatcagagcaatgccttcacacttctggaggtgatttagttttgacctagaattctttgtacaagacagacacgccttccggtgagaagataaagacctctcaggggacttccctggaggctgagacctgcgctcccaacgcagggggcctggattccacccctggtcagggaactagatcccacaggccgcacctgaatccacacaccagaggaagatcaaagaccctgcacgccccagttaagacccggggctgctgctgctgctgagtcgcgtcagtcgtgtccgactctgcgaccccatggaccgcagcccaccaggctcccctgtccctgggactctccaggcaagaacactggagtggcttgccatttccttctccagtgcatgaaagtgaaaagtgaaagtgaagtcgttcagtcgtgccggactcttagtgaccctgtggactgcagcccaccaggctcctccgtccatgggattttccaggcaagagtactggaatggggtgccattgccttctccaggggcagcctaaaaaatacataataaaaatatttttaaaaacatataaagtcctttcagacattcaaagtgtgaatctctctcttggatccattttggaaaggcgacttatagattgggagccacaaaaatgtgtgagtggaaaaagaggaaatttatgtgatttgactcaggcataaagcagaggggtgatgtggtgaggggagctgaccagaccagcctatcgggaaaaacacgcagtgacggccgccgccagcacggcgctgggctgtcatcctgaccccgcgggggacgcgctcacgcaaacaatggaggggatcaagaaaggggatcccactcaaacgtcaaggaaagttctagaataccaaggaagagccatcccagcatgcagctgtgcaacaggcctgcagaaacacccagacggaagggaaacggaagtctccaggaggcatgctaccaagaaagagaactctcggatttccgctgtgatcgcccggtggaaaagtgcaccgtgagcctgggagacgcaggaagaacggtttcccctgcaaggatggagaccaccaaggaagtgaaaacaaaaaagaaagccaagacacactaacacacgataccgtggatatggggaatcttaaaaaggggtaaaagcgaacttagttacaaaacagaagtagagtcaagatgtagaaaacagagttgccaggggacacggggggaggggcggggaggccggcatgcgcactgcgccacgtgacacggacgtgaacttgggcgaagctcgggagaaggcggggaggccggcgtgctgcggcccacaggccccaaagagccagacacgcctgggcggccgaacagcaacgcacttaactggagagcacacagaacccgtctcagtgctctgtaatgggctatatgggcaaacggtgcaaagcagaaggggcttacgtgcaactgactcactttgctgtgctcccggaactaacaaaacaccgcagttcaactacgaaagggaagccgcccagtcgtgcccgactctttgtgagcccatggactgtagcctacaaggctcctctgtccatggaattttccaggcaagagtactggagtgggttgccatgccctcctccagggaatcttctcgacccagggatcggacccgggtctcctgccttgcaggcagacgttttaccgtcagccagcagggaagccaagtcaactatactccaatacagtttctcttaagaagatggatagtaacttcataaagctcagaaacttgacctgctgatgctctttccataggcccaatagcgaaagcactaacaacagatttaaccgcgtattgcaatagagtcatattgagagaacagggctggcaaagcaatagatacggttatgtaagagagcgaaacctatatttagtataataggaagttgagacatcatgagtaacactgataaaagatcacagcatacacattatttagaaatgccagaagtgtgaaagtgagttgctccgttgtgtccgactctttgtgaccccatggactgtagcccactgggctcctctgtccatggaattttccaggcaagaacaccagagtgtatagccatgcccttcttcagaggatcttcctgatccagggatcaaacccaggtgtcttgcattgcaggcagattctttaccatctgagctacagggaagtccctgaaatgccagaagaaaacgctaatatatagaacgtggacttccttgagaatcagggtggggggaagtagggtggggtagaattaatttgttcccatagaaattaaggaagcagcacataagtaaatatgtatgaggatgtttttatctacaatgtttgtgtagacatgaaactgaaaatcacctcaatgttcatgagtagtaagacagctgaataaactactacatccataccatggaatttgcttagctatttttttaatgggttaaatttgtatctacttatttggaatatatccttaaagtactattaacagagaaagtcaagttgtaaagtaatatacaaggcatgattggactttttgcaaacaacagaacattgctatttaatttattgggctatgtatgtgtttatacatgagtgtggagacaaatgtggaaggatgcgtaccagctgttgaccttatttaccttcggagaacagggatggaaccagtaggggcagactgaaaacaaacaggccacagagaaacagagatacgggcaatagagacacaagatacgggcaacagagacacagagatacgggccacagagaaacagagatacgggcaacagagacacagagatacgggccacagagaaacagagatacgggcaacagagacacagagatacgggccacagagagacagagatacgggccacagagacacagagatacgggccacagagacacagagatacgggccacagagacacagagatacgggccacagagacacagagatacgggccacagagacacagagttacaggcaacagagacacagagatacgggcaacagagagacagagatacgggcaacagagaaacagagatacgggcaacagagagacagagatacgggccacagagagacagagatacgggccacagagagacagagatacgggccacagagacacagagatacgggcaacagagagacagagatacgggccacagagacacagagatacgggccacagagagacagagatacgggccacagagacacagagatacgggcaacagagacacagagatacgggcaacagagagacagagatacgggccacagagacacagagatacgggccacagagacacagagatacgggccacagagacacagagatacgggccacagagacacagagatacgggcaacagagaaacagagatacgggccacagagagacagagatacgggccacagagagacagagatacgggccacagagacacagagatacgggcaacagagagacagagatacgggcaacagagagacagagatacgggccacagagagacagagatacgggccacagagacacagagatacgggccacagagacacagagatacgggccacagagagacagagatacgggccacagagacacagagatacgggccacagagacacagagatacgggccacagagagacagagatacgggcaacagagacacagagatacgggcaacagagagacagagatacgggcaacagagagacagagatacgggccacagagacacagagatacgggcaacagagagacagagatacgggccacagagcgacgatgcggagaagaacaaggtctaggatctcggggtttatggggcataaacccttcttgcatggccctgcaataaacctttctctgctcaaaaaacaaaaaagaaggcagtctaacaacaaacaacagagggtctttaaaaagatgataaggagagctgggaggaacaatactcagagattctgacagaattttttagatcaatgaatagcaggaatccttagattcaagagacatactgaatcccaaacaggactatagtgaaactgccaaccatcacagacaggtacaaaaaataaaacaaagacctttaagacgatttgaggggaaaacaaacttctaaacaaaagacagactgacgctgactgcaccccatcagtaacaggagtccaaaaacaacaaaataatatttttcaagtgctgagggaaaatatttatgtagaattctatacctagaaaattattattcaagattaagggtgaattaaaagtatttccagatagagaatgacagagagagtttcacattcccaaatctttggtgaaataactactcagagatggatttcagtaagaatggatttgaactgagttggggaaacagaagccaagaagcgacatcagtaacatttacgagggcctgctctgtgctgcagcccaggcaccgttctaagtgattcacaagtaaattgggattccaattaaggcagtctggttctggacttcatagtcttacccacaatgtcaataaaatggcatccattttgatacattttaaaaagatttgtaaaaaaaaaattgtatgcagacagaacagaagcaagatgatacaggataaaaatagccgacagtgtcctattagaatacaagagagaaactggggtagaggtcagcactctgagaaatctacagtatattgtttcaaacagcacttgcatctgagacttgggaacaaacgtgatttttaaggtttgagggtaacagctgagatacagaacaaagcaagacaaatcaagaggagaagagtagtcatcgtcctcagagcatttctgtgcttggggggcaggctgaggagcaaggtgggggagcgtctgcgcccccggtaaggggccgcgaggtctctgccggacccgccgctgaacgagaaggtcatttctctccagtctcccccaggatgctccagctccttgcagttcttcaggatgtcgtcccgtaacagcacaagctgtgtggctctcgtgtcgctgtcagggtccctgtggagccttccagctgggtgtgaagggggtgcaacagctccggccccttctctacaccttcgcgtctgcaggcggaagcgtctgcgcccgcgggcaggcagcggctcgggtgaccgcccagtgacgccctgggtcccggtccccgtgctgccggggaccctcagtcccctcgccattcgctcggcccctggggggacagctgccttcgtctcccctttgttttttcctctctgcttcccttctcctgctgtttcctccattcctcctcttgcttctgggctgaagaggcatccagacagctcaggttaactgcttgagagctggttcctccaaaaatgcatccaactcagaaaccatggggacatcgctcccacacaggttctgcctttgttttggtcttcatgacacatacctgcctgggcttggaccctgagcacagctgtggctgggggcctggtggtggtggttcagttgctaagttcctaagacaggctcctctgcccatgggatttcccaggcaagaatactggagtgggctgtcatttcgttctccagggaaacttcccgactcaggggtcgaacccacatctcctgcgctggcaggcagattctctaccactgagccagcagggaagccccgggcgggggcctactgccacccaagtcgcaaggagtgggtgcacggaagaggaagagaaagcaacaggaaaacgccagcgagccaacagaagacagataagatcagaaaatgagtaaagcagcagcacgctggacggagaacatgtggattcctcctgaattccaaacacgacatcatcataaatgtaaacggcttagactaattcattaaaaggcagaaaccctcagactgaattttataaaactcgagctgtttataagagagaagcttaaaacatgtcacaggaaggataaacataaaaaatgtattcaactaataagtgtttttacaaataataaatgcttaatatatattttaattgcatgactcaattgatatgataaaatagacattagagccaaaagcatttggggggataaagaagaccactccttaataataaaaacctacatttaccagaatccttactggagtgggttgccatttccttctccaaaacacctaatcacacagtgtcaaatatgtacagcaaaagtgatttaattatatggagttaacaaattcaaaattatactgagagattttagcacacatctctatgaaatcaacagaccaagctttaaaaaaatgacaaatttaagtaatccatattataaatgttatttaatggatatgacaagaaacctctacaaaataaataaagaacacacatgaaatgtttacaaaagttaaccaggttctaggccacaaagcaagtctcaacaaacttcaaagaactgctaacattcagaccacactcatcaaccaaaatacaataaaagttgaaatcaataacaaaaccacagccccaaaccccagtacatcttaaaatttcaaaaacatgctgctaaactattaaataaaattgaaatgaaagtaacaaactatttggaactgaacaatagttaaaaccctagatatcagtagaaggaatgtttagcattaaatgcaatgatctgaaaacaaaaaatttagattaagaaaataaaaaggttaagcaataatgtaaactcaaagaccacaggaggaaattctttttccacaaatggataaagtagtaggaaagcaataacaaagataataacaaatcaataaaataaaaacaaagaaacacacataggaaccaatgtgaattctttaagaagactagtaaaataggtaggtattcaacaagaatgagagaaacaaagaaggcataaacaaacactattaggcatgaaaaggaatcataactacaaatagagtcaagtttttttaaagtatgagaattcaattttctgctttcaagcaataaaactaaaagcagatgaaatggaaaatctcctaggaaaatatgttaccaaaactgacacatacaaaaaaacagaaaaagaacaaaagctcctgaatgtatttttataagttcagtctaaagctatatattttagaagatagtacaaaacaagaaagcaataggtccatctaagctaaaaatatcaatgcaaaaatctaaatattagtaagcataccagtgtagtgtgtatatagatgtatatttatttttaaatatgtttttgatatgatatatatcatgatcacatatcatatttatcactggtaaatatagtgtacatatatgtgtgcatgtgtgtttgtgatgataagtaaagtttatcccagaagctcaacatgagaaaatcctactgtaattcaccacactgacacattaagaaggaaaaacgaattatcacaatagatgcagaaaaacattttataaaatttagtacccattcacaatctaaaaatacaataaaatacctagccaatcaagaatagaaggaagtttgtactaagcagtttctactaagaacctacaataagttttaggaacatatttcctttgaagtcaggaactagataaatagacattttctatcaccattctactcatccttctgtgaggtatctggctaatacaataaaacaaggaggagtaagagaaataaggatttgaaatacagaaacaaaaaaagaatcatttgcacataagaatgtctactcggagaacccaggagagactacaaacagttacaagtcacaggagagctttgcaagaatactggagacaagattaatatactgtacaaacagccatggcatcctcatcagcaacaaccaattagaaagtgtaacttttaaaagatcccattagcaatagcaataatctatgacaaacctaggaatgaatcaaaagaaaagggtgcaagagttaaatgaaaacaagttatgaaacttcactgacgtgctctgtgacaactagaagggcgggatggggtgggaggtggggggaggttaaagaaggggacactatatgcctatggctgattcataccgatgtatggcaggagccaattcaatattacaaaacaattatctgccaattaaaaataaatttcacttcattgacagtccttagacccaagtaaagagagctatatctcatgctcagagatgaaaagattcaacattgacatcagttcctcctaagttaatacagaaattgaacataattcatagtaaaatctcagaaaggttcttcatgaacatttttacctagttttaaaattcatgtagaagaattagggtcaaaagcagccaagacaatattgaaaacctgtaagatggacccttgtcctaccagatatcaagacacgtattaaagccttataattaagacccaattggtgtggctggctagaccagtgtaacagagagagcccctctgtgaacaggaacggggggtgggacagcagtggcattataaaaactgtgggaagtgactgaactgtttactaaatggtcctgagagaatctgtaattcacagggaaaaaatagatctctaactcatgctatatcaaaacatgaattccaagagaattagttaactctaacatatttaagaaaaataagacactttttataatcccagactaggagtgacacaaaccctaaaacaataaaggaagaaaatgttgaccaatttgactttaaaacttatgtgacagaagatgtcaaagacaaaggttaaaggcaagatagagaaaggggagcttttttttaaaaatatataggatatataatgaatacttgataatctgtaaggaaaaaaaaaaaaaacaacccactacaaaaaaatgagcaaaatctatgaactggcaatacatagaaaaagaaacccaaatgaccagaaaccgtgagaaagaaaagcataaatcaacagaaactagagaggtataattcaacaccacaacaaaacgtccttgaacccattttattagcaaaatctaaaaggctgatggtgcccagctttggagaagatgcgtgtcagcaagaactgtcacacaaggttctggaagtgtaaactgggaacaagtcagccacatctaggggtcagtgtctgtcccctaagacccccaaatccatgtctgcatctacactaatgcaggagactcggttggatccttgggtcgggaacattccctggagagggaaatggcaacccactcgtcttcttgcctagatgttaccacggactgcgaggggcccctaaggcaagtgatcactggacagggcatgagaggcggggccgggcgcggtgggcacagggcttcggagtctgtgggctcaaatccctcaccgtgagaccgcagtgctcaccccactcatccagtgattgacccacacgcggaactggaacctggtgcagacgagggtgggcggatgaaggggaagacaccctcttccccctggaacgaaccgcagcccgagcagggcgatgacataacctgattaaaaagggaaggtgccatgctgccccggtcatctgacgacttctcaatgagtctggaactccctcgcggggctgctgccgtgccgggtgcatctgccgaggaagcggaaggggccgggggaagtgagaacggtgacctcgggcctcgcggaggacgtccctcggccccgggcctccagcgggccggccgccccggtccagcggtgacccccgcgctgaccttcagcccctgctcttcaagaaactgcgcggctgagccaccatcttggggccagggaaatcctagagtcctttccgattttcaagagcttttccttaaaccaggacctctcaaaatccagaagagtggtccttaacgctggcacgtgggtgtgaggctcattcctggacccgcggccgcgacgtcccctcctggtgacacacgcgacgcccgggaggcggcaacggcactgctgtctgcagtctcggaaaggctgctccgtgctgcccccggtgcagccgcaccctcgggccctgggaccggtgtggacccggcgatccgatcgtagcttccagaagcagcaactcgcaggccccgcccaccctcggagtgacgcgcgcccggcgccccgctgccccgaaagcagcacacgtgcacacggcaggctgcaaagaagtaagcatctcccgacggtgcaagctgccacagagcagggtgggtagctgccggaatcctctctggaggcctggcccatccgagacggcatctttgcagtcctgaccggcggtgctggtgtccgtgtccccaggcatagccggtcgtgccctggctttctctttctctcccgtagtatttcccccccccccgcccctcccccggggagcacacttgcggcactcctccaggcttgttttcatgcgattccttgcctcctcacacctttccttgttgttttatggaaagttgctggtcagagttgcccaatacccatgcatagctgggtggtggcatcagatacccaggaaaacagagcgactattccagtcccagcctagagtccagagttggatggaaacacgaaaattagttgttgctaacaatccattgtaatgaaaatatgatcccagtaattgattttaaatagaattttttaaagactccttggctgcatttcatcacgaatacagagtttcaaaagcgttcattccagggttggattttttccccctttcttctggcttaaaccccaaatggcccagatccgagtctgaataaacagtgtgggtggtgagtgttccgtggggcccagtagaggatgcaggcactctcctattccgttcagcattaaatcatgtgagaccagcctgatgactccggagaacttttactcagtaactggagggccacataacgcgtcctgtttctccgcttttcggggagaaaaaaaaaaattaattctcctaactgccaaggtttaattatgtataaagttcattgacctcacaggcggctgtcagatgatcttgcgaaggcccagagaaaggcatcccaggaatgcggtgatgtgggcagaaactgtggattcaagccaccgaatgctttcaacgggccggaatcagcagccgctcagaaagactccagtgcagacagaacttcagggtaatcactcatttcatctcacctgagcattggtaggccttcaaagggattgttacagatcagaaaagctccggcagaacccccgagggaccgtgcggaggcgggtcggtgacgacgggctggcgctgttctgtgtgccgccagctctcgtgtggatgcccggcgttctctccccgttttggaggcagtgcctctgacccctgataccgacagggagagcgaatgaggaagcaggcccattcatcaagacatggtgggccttaaaggaggcaggagagtccatgttgtttcccacggttttgatagaagacagcatggcgtgtctctacagtgactttatctgtctgccaataaagtgccctcaagtgtgtccttacacaagggctgggttctcctctgagggcttggggggtggggggacgagcaagctgagcttccagaacatgtgttggtcttctggtctttcacggggacacccccgtcgattggcaccccggttactgagaaaactggacctgggctccttggtaccgggaaggcggagcccaggaggcaggtgagcggggtgttaacttcagaggtcctctgattcagagggagcaaatgcgaaatattttggcttggcgcttccaaagatgaaaatgacctgatggggtccagtatcactttctttcaggacctttctcactgaacatactcactttatcagtcaaaatatcatgatttcaggggtggaatgtcccagggttgggttctaacctaaatcagctgcacttaccctagtggctttattgttatgaatatagagaatgggtgaccagaatttaaccaacattttcatcctctgatggcagcggaatggaaagattctcacttgtttcatttttagataaagctgaaattctggggttctttaaccaaaatcagccacctaggttttgaacacacagcgtcagggggctttcagcccacactaattcaacaggtatttgggaaacagaaatagcgggtgctctcggtgatgcagacatgaaaaagggaaccctgccctcaagtaagtcacaggcgaagaggcggacgctaatcccagcgggaggccctgcctggtggtgcgctggagaggcatgcccctgccagtccctgctcccagaagagtccacgtgccaagaggcagctgagccgtgtgcctggaggccgtgctccccgacaagggaagccacgcgcggcaagcagagagcagcccccactcaccgaagcaagagagagcctgcgtccagcaacggacacccagcacaaccaaacacaaataaataaaaataaaataaaatccccactggaggattcgggaaggcttcccacatggaaccctcccaggtgaggtggcatccgcctggaaccttcagccaaagctcccttcacgcgtgttggctctggcattctaagtcatgcttggccacggccgggggtctacaactgtcccttgtttttaacccatctcgtatgtgaggggtcttaaagacccaggccatttaataaagctttcttcagggaatagggataaaggaaaatgccctctgtcttcccactctgaagacggaagccttccttccagtttttaacatttttctagaaatacgattatccccatagttccagaagaaatacacgtccaggtaaagaaatcgacacgaagtactatcctaaatcatttccaccctttggatacgatttataaaattccatgaaggaaatgactcttccttctcgtgaagtcctgtggggaaatcagagggagctgcggtcctaaaaagctatcctcctcctcccgatcccttccttcacccaggggctcgccgccctcagccacacagaaatttagctctttcttgtcgtgtatgtgttgcaggaagtggcaatttgagttcatgacttgtctctgttatgtggaaagttcctggacatcgagaactgtttccttttcttttaaaaaataaaaatgctcaaaactgagtttatttattccaaaaatatacaagattaacttaaatgactgatttaaaaatatcaaccattctaatttgccatttactagaatgaaagaaaaattatagttatttcaagagatccaaaaaaattataaaatctaacaccctttgttataaaatctcttagctaaccaagagtaggagagcaccgaggctgatgaagagcattcattgctcacttccatttcctatgagagtgggaaagagacgcgaaatgcctgtccccctcactgccgttcaagttgttaaaaaattcatttcaaccacagtttatttacagcctcgtgttaatttctgatatacagcaatgtatcagtctcacagggatgtgcgttctttcccatatcctttccattatggcttatccccgatagcgaatgccgcacagcagggccgcacagcagggccgcggccgtccgcccgtttactccagtctgcatgcgctcgtcccctccctccccctccccctgctttcctcatctccacatttctcacagtgtctttttaggtgtttactgagcaagtgaatgagtgagtaaataaatatcatagagatgtctttgatgagttgggacactttgagtaacggtatagaaagcaaatgttttaaggcattcggtctcttttatagccactcaactgtgcttttgtaatgggaaagcatccacagacagtctagaagcaaatgagcatggctgtgtcccaataaaactttattcagcaaacaagtggccaggtgtgccccacaggccacagttttctgattccccatctacggcacttatctttggcagagtaaagaaagtagagggtattagtcactcagttgtgtctaactcggtgattccatggactgtagcccgccaggctcctctgtccaccggagtctccaggcaagaacactggagtgggctgccatttcctcctccaggggatcgttccaacccagggatcaaacccaggccccccgcattgcaggcaggttctgtgcatctacgatgcaccaccagagaagccctgtctttgtccggcatcttagggcactgttcacatctccatagggcacctgtatttctcaataattgtagtgaatgcaaacattcaagagtggtttgggaactccacattaatgaattcattagaaaaaaaaaaagaaacaggaagtaagaacttaaagtcacttattttgtatatcgtatgcctttaaaaagaacaattcttattccccaaatgagagtagtagtttcgccatttgcagcatgattattgagtaaacttgatatgagatctccgagttattgggtgaagggtgtgatgctggagcatggtgaacttgacactttcctggaagagggaataaatgcacccccactcccccccaccccccgccacaacccacctttcctgttctccaccagatggtctggtctctgattttacagctaaaattcttcccgaggttattaatgcagaggatactcctttctcttggtgaccctctggaaaacatccagctacaaagagcacaacagaatctgaaaagctcagggaacacacagaaaagtaagaggcagccgcgagaaggtgatgaaagcaagatgccccagcctgccgccctggcctgactcaagagcgccctccctgctcatccttactctctgcctcactatcagccaccttctgtgtgtatttagtgaaaaaaaaaaaaagatttggatttaaattatggtggaaactcatagggtgccaagtgctaaggtcaactgcttggcttggaaaaagtcaacctgtgcttctcaaggtatgcggagatgcacaaaccacgtccgcgtgagcacccggttgaagacctgtgagacaggctgttctgaggtgaggatcttcaaaccggacccatcatcgccagggcgtcgcgtacaggtctagagatttcttggaagaaagaaaaaaatgaaacttgggcctttccttataccaagcgtctcaacattcagaccaaacaattagaaggattctgtgccttaagaaggggcttccctggtggctcagacggtaaggcgtctgctcacaatgcgggagacccaggtttgatccctgggttgggaagatcccctggagaagggaatggcaccccactccagtgttcttgcccggagaagtccacagaaggaggagcctggtgggctacaggccaccgggtcacaaagagtcggacacgagtgagcgacttcactgtgccttcagaaaaggagaaaccgtgagtttcgaatggaagctaccactgggaggctgaaaatactgaattctgatccctgtattcaacctgtgtgacttgaagcaaattatctccggttattgtaggctgtcctaactttaacacaggcctaggatatccacatgatagaggagaaatctgggaaacagagaccatactgtatctggcccagttcattgcagcaaatcttgagagtctactacgtgcttgcattagagagtggaaaataaataggccacaggcgctgagctcaaggagcaggcgatcaccgcttacagctatttggcaacactgtagagcccgcatcccccttatcagccattcccaccgcaacaccccacgcccaccggctgccaaacaggaagcccaccgccaccatcattcggaacagagctcgagtgagcagcatcccatatgtgaaggggtatcatttatacaaacataactcctatttgataaaactcccaattgcttaaaacctatgtggccaagacacgtaggaatctcattgcaacgttggttgggactgagatgcatgcaaagacaagttaacaggacttcctcagtggttcagtggttaagacttggtctctcagcacaggggtgcagttgacccctggctggggagccttgcggccagaaaaactaaaacataaaacagaaatactgtaaaaatgtcagtaaagaccttaaaaatggtccacataaaagcatcttaaaaacaagaaaaagaaaccatatgctagaggagaggacccccccaaaaaaagatgagctaaaaagagggaaatgtgagctagacaagcacaggcaagggtgaagtgagggcagctgtggacgacaattgaggaccacctcttccatttcggttgtgatgaccttccgggtttggattgggtggttgatgttcttcaagcgaagaatctcagagcatgaagtgttcacgtgctggcagctgctggcccgaggggtgggggaaaggtgacaggccggcagggagcccgcgactcccgagcctctttggcttccacccagggagatggcggacaagcagcaccagggggaagggctctggttccttttttttttttctttcaaagatttactgaatttgtcccaatattgtttctattttatgtttttattttttggctgcgaggcatgtggaatctcagctcctcgaccagggatcaaaccggcaccccctggtttggaaagcaaagtctcaacccctggactgccaggggagtctctctatttcctttaaaccagcttctttatgagacacaaacaagtaacgtgcgagagaaaaataatacttagctcaggaacttatttgcagttcaatctagcatcaagagatgctcttaatctcttccgaggcttcctgagaacttatctgctcgtctctcctggtctccagcttctttaacactgaaaactttacctgaaatacgaaaccttatgtggcgtcgatctggagattccagaggttttgtttagcaaagtaaatgggctcctctgattagtgtgtctagaacaatccaggtaacatgtctctttaagtcagtcattccaaagctagcttccaaggagtgctactccagcctcgagaagcaggcccacatgagttatttcatcagaaccctggcagctctctgggtaaagcagacaggaaatctcgaggagaaaaagaacctttcagagcccgcttcgggccccctcgcattgcttttttaaacatcacaagattgatcctaggccacagacgcagcatttggccatcagatgcaggcagatgttttcccttaaatccattgtctctccctcaatctgtttattgctatttccctctgggcctgcacctcaagctcctgctaactgcatgtccacacacaaagaggcatctttctagcactgattctctcttccataaggatgtgtccgctcaggaggtgacctatttactcgttgccggtgcgtgcgcttccttgaccatctttaagaactaccgcagcagatgtccccgaggattgaggcttccctggtggctcagatgctgaagaatctgcctgcgatgccggagacctgtgttagacccctgggtcaggaggatcccctggagaagggaatggcaacccattctccattgcctggagaatcctatggacagaggagccagcaggctacggtccagggggtcgcacggagtcggacacgactgggcgactcacacacacacacacaagattaagtccccaaagtcaaaccgggacttaatcagtaagggttttcttgttagcagtgaccttgggcggtcacgtgagctggtgtcagcctcttaaatcaactgatatcaacggacaggctccctggatgagctcaggcctatttattcgagtcttctttcttctgggctgatcagtgctcttcctaccaggcagaccaagaatctccatctgtgagtcagtcatggagatcccacggcagccaaaccaagtgataggtttcaaagatgtatccaacctctctcaccgcagactcatccagaatatgacccagacaagaatcagggcaacatctgctgttgtttctcatacccagaagcgccatgagataagggagtttcttgaaggtgatggaatagttctgtgtactgatcacaggggtagctctaggatcctagacatgggataaagtacacacacacacacacaagtatgtctaaaaactggtgaagtctgagtaaggtctggagattacactaatgtcaatttcccggtgttgctaccatacatactgtgaacatcagactagatgctacaattacattatactgtatgcagcgctaccacccggggaggcaaggtgaagggtacctgggacctctctgtgctactttgcaactttttgcatctatacttactgcaagatataaagtttataaagtgccatgaggtacacgtgtctttttcaattatggtttcctcagggtatttgcccagtacggggactgctgggtcgtttggtggttttattccgagttttttaaggaacctccatgctgctctccatggaggccgtatccatttaccttcccaccaacagtgtggttcccttcgcaccacaccctctccagcattcatggcttgtagactttgggaggaggaggtggggaggaggctcaggagggaggggacatatgtgcacttgtggctgactcaagtggggggcggcagaagccagtacgatactgtgaagcaattatcctccagttagaaaattttctgaaaagcgccgtgagaaacagctcctgtttttgcctggcagcagcttgcccaacttcgcctaattgtatttgaagttctaggctgctgcttttcctcatcatctaaactagtctgcccctccccacttatcaggcattatgtttttggtgtctaccaaatcctaacttgtttttactaaggcatcatctgtatctctgccttcatacaggagctccatgagaagccagtggcttctgttcaccactgaatcccaacaccgaggatagcacagtcattatttgtcagctgcatgtctgaagagtggatgaaacacccccaaagcaatggcccattctttgagaactctgctgcaattctcaaatccacaggttgttataaaatgacacagaaatcattcgggctgatttatggatgtcaaaatcattctgtttggctaagagaataaacacatcaaaaatttgagtgatgttttcaatgtgagcagctgagttcaagagccatggggatcccaaagaaaagatactacctcctgttgaattttctgtctgaggccgaacaagaccaatagttggtaaacagatggggagataggaacaaacgtgtatcgaaacacacacacacacacacattttctcatcttcaaagatgcaaagagatcttggtacttcctttacctgtagtaaatagggagctctgggcaaagagcagaaaagcaccagtgagacaggttggtggggggcaggaggaagggaaaaagaacccctgtgagatgcttagaaacacgtgagacaaagaggagggagaggttgtgggggaaggccgcccaaccgacccccagtgaccagtccagagctgtcctcccgaaacacgtcacatccctgctcaaagcgggaggtgctttgggcaccagccatcatgcccaagatgccagggttaaactcttaagagttgtgtttttagatgcgatgaaaggttttattataaataaatgagaaaccttacatgcgtctgctttagtgagaaaaaaaaaaacttcccccaaaagaccccttaaaatcgtgggaataagtaggccactgaccccttcgcttgaaaagtctccttgaagccaagagcctgaagtctgtctttcgataccaaagccagcctgtgccgactccccttcatttcacgcttctcttaaaagaaaacaggctggactgtttcagtaaataacaaaaggtcaagagaaatgctactcacaacatgagcaaaataacggcgcaacctgccaaaatgtttcctaaggcctgaccggcagaacaatcagtggtgaaacagtccacagatctactgtgagagcagagattcatcccagtaaaacctgccatgaggccctagttcctatttcatccataaggaaaaacaaaaacaaaaaacacagagatgatcccatcaggctcgagcaactttaaagaccacatcccgtgtgaaggagtcggctgcctgtgtgtgctgtctctcctctgcttagatgatattttgacatgagagccagtgtcaatgtggtggtaaaaacactcagcaccagtggcctctgtgtccatgaggtccgtgtctgtgattccaccaactgcagatggaaaacagtcagaaaacaacattctagaaagttccaaaaaacaatacatgaatgtgccgcaggctggcaactgtttacacagcatttacattgtatttacaactgtttacacagcaacacactgcactaggcaaggtaagggatttagagggattttaagtattccagagtccaggcttgggctcagtcatgactttctgcgaccctgtggactatagcccgccaggctcccctgtccgtgggattctccagggaagaatactgaggtgggttgtcctttcctcttctaggggaccttcctggcccagagatagaacccacatctcctatatctcctgtctcctgcactgcaggcggtttctttacctcctgagccattcaggaagagggcgtaggtcatatacaaatactaggccattttatacaaggcacttgggcatcctcagagttgggttccggagcgaggcgggggtgatctcagaactgagctgagaactaaagctcaggattgtaaaatctcctgaatgaaacttccaactggactgactccatttacggtaggcactgaatgctcattctctccttggaatctcactaatatgaagagaattttaaaatatccattataagaactttagagagggagaaataaacacaaggcataaaccaggactgttcaccctcaagacatgacctctctgaccctgcatcggtaaccttccgggacccagtctgccagcctattcctgccccaggcctggtcaccaacctcacacctggagtctgctcaccaggctcgttgcagtgactggatcttacacatgtctcgcctctgaagggtcttgcaagtggtcaacacttggtgcattcatgggctgaatcgatggcacccatgtgctaccacattcctggcttaaaaccatagagcagtgttttgcaaaatacgtcccatgaaatactagcctggcaagatgttacctgagtgcaaaataactctgattccatgatgaaatacgttttggaaaagcttcagacaatgagtccactccctcattttgcaatcagaaagtatttgagggtctgaaagacgctgagaagccccccagggaagaagggcttcccaggtgacgttagtggtaaagaacccaccagccaatgtgacataggagatataggagatgtgggttcaatctctgtgtcgggaagatcccctggaggaggaaatggcaacccagtggagtgttcttgcctggagaaccccatggacagaggagccgggagggctgcagtccacagggttgcaaagagtcggacacgactgaagtgacttaccgacctggcacacacgcagaggaaagaaacctgcttaagtcagaatctcccaggtggttttcagaaagctgttttcaactcatacccgttaccatctcgaggatctaagcgtcttgtggaggacatcctgacgaatttgactttagagcagtttctttttctttttttttttagagcaatttctgattcacgtctaatcacatccagtctgtccttaagtcctccaagatacattattgtgttcaattctgcccaaggaacacagtctgtgagtttcctcttctttaacctctggctttgtaacatactcaactcacagaaggtcagacctggaagtgctcttagaaagaaacacaaagtaaaggtcaagccctgaatttaacagggctgttaaccaaggaccccgtggtgaagagactggcctaggattcttgttcagtcgctcagtcgtgtccgactctttgaggccctgtggactgcagcacgccaggcctccctgtccatcaccaactcctggagcttgctcaaactcatgcccactgagtcggtgatgccatccaaccatctcagcctctgttgtccccttctcctcccaacttcaacctttcccagcatcagggttttttccagtgagtcaggtctttgtatcaggtggccaaagtactggagtttcaacttcagcattagtccttccaatgaatattcattgactgatttcctttaggatggactggtttgagctcttcgagttggctcttcgaatcaggcagccaaagtattggatgacaggatacaatacagtttggctccctaaagggaagggtggtttcaggcacctctgctctgctgcccagggataacgaagtcagggcttacgcaggggagggtcctcctggaagagagaagatgaaggaagccgggaaaccccagagaaccccctaacggcaggcatgcacacccccgccctcccatctgactccaacatctcccatctcgcagtttcctccactcctgggtcaggcaactgaaaagacacggcagcgcagggccacacagtgagcaagaaactatgtcagggtctgagccaagaacagcctgatttcaaaacacaccctcctgctagtggatgacactccctccacaaagaggccctcaagaaagcgtgtggaattacacatgaaaccaggaatttgcatatctgaaattagtggcagagacgacggccagtgtgcaaggagggaagaacagagagagcctttgttccatcaaaatactctctcactcgtgaacatgaaggagaggtcgggtctctgaattccctgtgaacatgaaggagaggtcgggtctctgaattccctgttaatgaaatgaaacttgttttaattaatcaaaatggaaccatgtgaatcaaatgtagcgcctgcgtgttgttacatccgactctttgtgaccttatgggctgcagcccgccaggctcctctgtccatggggttctccaggcaagagtactggagagggttgccatggggatctacccgacccagagatcaaactggcatctctcgggtttcctgcacttcttgcaccttggaagccaagtgagtcaagcaatgagaactcaattctgctgttactgaacatcacacatatctgcaaagctttgcatgcccactaacgtgaggtgttactggcttctctcgctacatgttgaccactttggtcatgaaatcagtgaggggcacaagcgcaggcgccatgatgacggtggtggcagcatatttccattttatatcaaagacaagcacttttcaaaactcccacggttctactgaaggaagaactatttcagacacaaacaactgataaattatgagtatacttttcacattcatctctcagcaatccaaatttaaaaattcaaaaactcctttatttgcattttttgagttattttgaacacaaagtaatttttccatttactagtggaagtactgtcttcaggagagtttctgaagcaacatgtggtccaagtattaagactgacaacaataagccaacagcaaataataatggtcacgagtctatgaataatcaaactaaataaaatattggcctggaaggatttacagtgctctttataataatcactgtgcaactcagcttatgtataacatggagtttcaatattggtagaaggggaaattttaaattttagtacataaaagtcaaccatgactgtgtaatattaagaaaaaaatgactgaagagggtgttttatgcttcaatgtcaagatgagttttttagtcagtgtcaaatagtgctctcattaagtttgccatttggaaattttttaaaaagacaaaaatgagttgcaagggtaaatttatacctctactaatattttatccttcaaatataaaaaatgctaatttttcttagagctcaaaaaagttatccatgagctcttcattcactagattattattagatcattagtattgttgttattctgcgctaagtcatgtctgactctttgtgaccccatggactgcagcacgccaggcctccctgtccttcagtgtctcctggagtttgctctaaattatgtccattgagtcggtgatgccatccaaccatctcatcctctgtcatccccttctcctcctgccctcaatctttcccagcatcagtcttttctaatgaggtggctctttgtatcagggggccaaagtattggagtttcagcttcaacatcagtccttccaatgaatattcaggattgatctcctttaggatggactggttgaatctccttgaagtccaagggactctcaagagtcttctccaacatgacagttcaaaagcatcaattcttcggtgctcagctttctttacagtccaactctcacatccatacagtgactactggaaaaaccatagctttgactagacggacctttgttggcaaagtaatgtctctgctttttaatatgctgtctaggttggtcataacttttcttccaaggagcaagcgtcttttaatttcatggctgcaatcaccatctgcagtgattttggagctgaagaaaataaaatctgtcactgtttgcactttccccccttctatttgccgtgaagttttgggaccggatgccatgactttagtttttttaatgttgagtcttaagccagttttttcactctcctctttcaccttcatccagaggctctttagttcctctttgctttctgccataagggtggtatcatctgcatatctgaggttattgatattcctccctgaaatcttgattccaacttgggattcatccagcccatcattttgaattatctactctgaatataagttaaataagcagggtgacaacataaagccttgatgaactcctttctcaattttgaatcagtccattgttccatgtctggttctaactgctgcttcttgaccagcacacaggtttctcaggagacaagtaaggtggtctggtattcccatctctttaacaattttccacagtttgttgtgatccacacaaaggctttagtgtagtcagtgaagcttgagtagatgattttctggaattctgttgctttctctatgagccagtggatgttggcaatttgatctctggttcctctgccttttctaaacccagcttgtattaatacatctggaagttctcagttcaggtactgctgaagcctagcttgaaggattttgagcattaccttgctagcatgtgaaataagtgcaattgtgcaatagtttgaacattctttggcattgcccttctttggaattagaatgaaaactgaccttttccagtcctgtggccactgctaagttttccagatttgctggcatgttgagtggagcactttaacagcatcatcttttaggatttgaaacagctcagctggaattctatcacctccactagctttgttcatagtaatgcttcctaaggccacttgacgtcacactccaggatgtctggctctaggtgagtgaccacagccccgtggtcactgtgtaggtctggcatggagaagatatgcctaagaaatctactagatctagaagaaaagaggtatagaaggcagaaattaagcagagagcagggacttccctggtggggcagtagattaaggctctgcactcctcatgcaaggggcccaggtttgatcctcgctcagggaactaggtcccttgtgcttacaactgagacccagtattgccaaataaaaaaactttttttcaaaaaaaattaaaaaatttttttcctccttaaaaaatgaaggaagcagaataggcaaaataaatagcttcctagcaactgccatttcagatctgtcttatttatgcgactgcacaggcaagtttgctgtgttagtcgctcagtcgtgtccgactctgcgacaccatggactgtagcccaccaggctcctccatccacgggattctccaggcaagagcactggagtgcgttgccattcccttctccagggggtcttccccacccagggatggaacctgcgtctcctgtacggcaggtggattctttaccactgagccaccagagaagccccaattctataaacaaaaatgtattttaatggcaaatggaaccatccctgagaggaacacagttccttgtccacctcattgtgacagtaacaacagccaccactggcagtggtagggcaggccaggcaacggtctaagctcttgactcctattaactctcaacacgtaacgagcaaggtgttattattgtaattggcgcttctcagatgaggaaaaggaaacatcgagaactgggtggagaaggcagagctgaggcctgaattcaggcaggctgtctcgggtccacgcagctaagtcctgacaccaactgtggagctcaagctgggtttcctgttctgacccgcctgcaggagaagcacattcagagcagctgccatcacttcccatacagaagcatagcacacgagagggttaaagcacgctgtgatcctaccgccacatcgcggaactgggtcagcctaatcactggcgagctggaggttcctaactgccatttccaaacatcagtgaccggggcaaacacgtccctaagaacaccagccgtttacagtagaaatctggggtggacatgatttgaggtgcacatcagagacttctttgattataacaagttgatgatttcttagacatcctagatgtgaagaattaaagaatttaattgccagagttaaagacttgtctatttttttaggaaaatgagatttttatctgggattccccagtatattagaaagatgattcttagtataattgtgggcaagaaggaaataatatacatatttgtggctatgagtagctaaccagaaaaaaaaaaaaaagaaagaaactgtctggacttgcacagttccaaaaactactgaatgtttttttttccccccatcctatgaggcatttctttcttttcaaggaggattcatttcccacctgtgtcttttacatttttgaaatacatataaagttaatgtttatcttctatccattgaaagcttatctaagttattctgactttgggcttttacttccaggagtcacaatctgtttggccagcttctgtgtgagagacagcttccttttatgtgcagcaaactctctactatttagaatgtttgcttgggagataaagtgatacttggtggttttcctactttatcatgattcccatctgcaacacaactggacagaaactaatgtccctgcattgaactccatcctcctggatgagcacatctcataactggggcagggccaccagcgcaaggctttctgaaaatagtccaatattacataaaacatctcaatgtctgtattgtaagttaacacatacactccaaatatgggttccagaaaagatgcaatatgaggcggttcaacactctggccacctgatgcgaagagccgactcactggaaaaacaccttgatgctggggaagattgagggcaagaggagaaggggacgacagaggatgagatggttggatggcatcaccgactcgatggtcgtgagcttgagcaagctccgggagacagtgaaggacagggaggcctggcgtgctgcggtccatggggtcacaaagagtcgggcaggactgagcgactgaacaaccacaaagctttgagatgcactttcttcctccttcacacgaaaggtctgacctcacctccagggtagatcctatctttaggtagatcaccacaaggcatcatcctgacagcgcacctgaaatttattccctggatttcagcaaaaaccgtgggatgggagcaaaagaacgacagcaaggggtgaggccttccgagggtctgcgtggaactcgggcagagatgagacacaggggcagaccgtggcgaagccaggctcggcctgctggagcggggcccggactcgggggaggcccgctgctaggcgggacgcctctcgggagcgtttggagtgatcagagcacacggtgggaagagcccgtcgcagcctctgccttcatcattctcatcgttcacgtcagtgtcccgtttgactgagtgcacagctaaggtcttaaagggccaagtgccacagggctagagaagggcaacgccagtcccgttaccttctccagttcaaaaaattacagccagaacttttctgtaggggccggtactggtcggcaatgaaatggggtggtgaagaggcctgctcagcccggagcgccactcctaataaacagatttaagcatgccgtgggtttagagctcctccctggatggggacggggtgccctcaggagcacagaagctgtctcttcctccatttctccaagggaaacgtccagggacacaactctgtgcttccaacgggaaatagcatgctcagttcatttactcaactgtctgtcgttcagttcttcagaaaccaaactggtctagtgtgagtcctgcaagtcaagagtatggactccgagaaatgccacttgctagccgagagaggcgacgcagtttcaagagactgagtgacttcctttactctggcccgggattgctgagtaaacttgggctacgcatgccttaaccttggtctaccctggatttcccctgtgtgaaaaacgtgggaagatgctgtctaactgcttctcagggaagatgtgaagctcacctattcagtgttctagacagcacggtcccagggcagtgcagcgcgccgtctgccctttcccttcacttgtgactgtcgtggctggtcacacactcacacgtacacacaccatttcttaccaaaaaaaaactcacagcaaggaattaattccaatcttatttagggagacttcacacaatgtcatatttaaaacatgaacattctagaaactaaattcaattgcacatggcaaaggaacacactaaaagctcgaaatgacgatttccccatacataagtgcttccctcagctcagttggtaaagaaaccgcctgcgatgcaggagaccccagtttgattcctgggtcatgaaggtcccctggagaagggacaggctacccactccagaattcttgggcttcccttgtggctcagctcgtaaagaatctgcctgcaaagagggagccctgggtttgacccctgggttgggaagatccctggagaagggaaaggctccccactccagtgttctggcctggagaattccatggactgtagagtccatggggtcgaaaagagtcggacacaactgagcgactttcactcactctgccatacacaagtgcttcaaggagagaaagaactcaaacagatggtcaattaatcaaatttatttattgggataaacagtcagtaatctcattctgtttagattgtgtttaaaaactctatcaaaatgctgtcattggctaaccatcaagtacttaagtttgccagttctagaacctcaagttcaaaatgaccctgggagaacacagatgggcagacactgtcttgtgaccacttaatggaaaaagaagttaagacagagttagagggtgactcactccagggctagagacacgggctagatttgcatgtgtggactcaaaccccttcacctgtttgctcacatgctcaacacgcatacttacaggccgctcaggggcctggactagcggacacagttagggactagagggtctatttctagattggggtcaccaaacagggagcccaacctgctcaccccacacggagcctgtccccagtcttgagtgtctttcatggcaggtgctaaagaaccaacctaaccagccaggagtaagcggagatactaacagtcacgttcaaacatccattaaagccgaacacaggtccgtgaaacaaggctgacccaggacaccctccgtccagtccacacacaccggggaggacggggtcagactcattgcatctaagattgtgccgtttggggctccccgtggtccagcggctgagactccatttctcccagtgcaggggcccacccaggttcgactcctcgtcacggaactagattttccgtgctgcaaccaagacccggcacagccaaacaaatactaaaaaaataaaatagcgcaatttaccctaagattatgtccttcctgtttttggtgttaaaacagattttactttatcactgagaataaatagtagctgattttttaatatcccaacttggcaaaataagaagtcagaagctctatattggtccttaaataaaaaaggtaaaataaaaagacttttgaaatccataagtttggctggctctgcctgacaatgagttacctgctattagaaactcctaaagagtagagacccataaagagtgggtattattttatgtgatcaaatatttcctaataagacacaatgcttcatttcaacctgtaatgaaaagaattttaagctgtactaataaatggggtttacagctaagctggaaaagtatgctgccatctaaaatcaaatgaaatacaaattctaaagcatcgtaaacttactcttatattcccattcttccaaaagtataaagcattttaattattgctttctgatgctagctgcttttctggttaggttggtgctaatgaaccaccctaatcagccaagagtaagtggagaaattaagttatgttcaaacgtccgttgaaaccaaacatatgtccacgaaacatatgagagagcatatgaagagagcacgaaagcaatacaatccagcaaacacacacacagcagcagagaacaaaaccttctttactgtctttccacttgtagatccaccgtatagaagctttagagaaccatcagttctgcatctgtggacagatggcaaaggatttaaccattcagccagccacagagaacccaggagccaccagtcttggcactagctgacagaggttgggaggtgggagggagaaggggagtcaggagggatagtgctcccactttttaatggataattaaatgataatctctacgattagtggaataagaaatgaagtttcaagaatgcgtttgaaatgtaagcaacacccttgggggtgaggggctgggaagggtgacatcaccatggaggggagaaactcggggaagaaatggggctgagtaaagtgtgaggtcaacaaaagcaaatgctcacaaactgagagcttgcattaggggctgaatcgtgcccccttttcttcattttttaaaaacacttttattttgtattggtgtatagctgattaacaatgttgtcatagtttcaggtgaacagcaaaaggtctcagtcatacataaacatgtatcccttccccctcaaactcccctcccatccaggctgccacatgccactgagcagagttccccacgctctgcactgggcccttcttggttatccattttaaatacagcagtgtgtacatgtccatcctaaaccccttaactatccctccccctgtcccctgccccccggcaaccataagttcattctggaggtctgcgagtctgcttctgttccgtaaacaagttcacttgcatcatgcctttttagattctgcacataagggacgtcatccaatatttccccttctctgtctgacttagagtctccaatagtgtctgtttttgatacattccagtcctaactctggtgcctgccagtgtgacctgttttggaaacggggcctttgcagatgtaagactgtcctctgacccaatgactggtgtccgtacaagaagcgggaaacaccacggggcccagactcagggagggtgctcggggcccagactcagagagggccacggggcacagactcagggagggtgcacgggacatagactcagggagggtgcacggggcccagactcagggagggtgcacgggacacagactcagggagggtgcacggggcccagactcaggacacagactcagggagagttacggggcacagactcaggacacagactcagggagggtgcacggggcccagacttgggacacagactcagggagggtgcacagggcccagactcagggagggtgcacgggacacagactcaggacacagactcagggagggtcacgggaaacagactcagggagggccacggggcacagactcaggacacagactcagggagggtcacggggccgcagaggcgactggaggagacacagagccagcgggggctgaggacggcccccccagccgagggcgccttcgggggagcaccgctctgcggcacctcgactctgggcttccagtctccacaaccgtgggaggataacctcctgctgcttgaagccaccttctctgcggtactttgctctagcagccttatgaccttagtccaaacagtaaacgtacatggcaaattcatgtcaatgtatggcaaaacccactacaatgctgtaaagcaattatcctccaattaaaatatataaattaaaaaaacagaagagctctctaaataatattaataaaataagatataaatcataagttaacatatatttagatgaagaacttaagtatactaatattaatataatatgtctctatattatagataatatctataatagatatagataatagataacaataaacatttaaagataagaactctttaaataacatcaacatttatatattatagataatatataacaataaacattatttaaagatacgaagaactctttaaataaaatcaacatttatataatacatataatatataattatatattataatattataatatacttctatattataatatacttatatattatattacatataacaaatatatattatctgtattaattatattgtatataatatatacatatattatagataacatataacaataaacattatttaaagagatgaactctttaaataatataatatatactatattacatacaatgtatataatatatactaatataatataatgataataataaacatatattctttaaatcaccaaaagaacttttaaaaagtgtgggagggttaaaagatattgcctctgggaagcaagtgtaagggaggagcggcgcagtgtggggcctttattttgtattaaatgccttctgtgctctttgactttttaaccacacgcgtgggttactccgacctatggaaagcataaatgaaacggccctgagggcatcaccaagaacctggtcagccctcccggtggtcggcgctgagcactgaggacccccgcatccaccgccccccagccgcctccaccctgcagcggacccccccgggacactgccctctctgtcctcagggacacacggcggctgagtgtgcaagtgcgcgctcacacgcccgctggccccatctccagtatttttgaactttctgtgggtttgtctcagcaatgacagtaatcttccctattgacttggatgattaagaatcgaccccagtgaaaacagagagcttcagagagcctgtcgccggcttccttcccgaacaacgcctgacccagatttccgtgactccgctacccagcatcagaaaacctcacaacagggctcactcacaaccattcgtcatcgacttttatttaacccacacagagaaatgctgagtgctctctggtggcctggatcaagtccctcgggtccgtgatgcgagcggtgactttctcggatggacaggtggacagaagaggtcccatgcgctccgctcgctctaagaagaatggttgcattgagcccagcagccagtggtgctgtggcaaagcgtgtggtcacctcccacaggaagaggcctactgatgaccgcgggaccgcaagggccccggcagccggccggaggcgcgggacagcgggcagctctcccagcgcgcccggccgggagccgcagaggacccacccggcgcgtgcgcacactccgctcacgcccaagacacacacggcgcgtgcgcacactccgctcacgcccaagacacacacggcgcgtgcgcacactccgctcacgcccaaggacacacacggcgcgtgcgcacactccgctcacgcccaaggacacacaccggcgcgtgcgcacactccgctcacgcccacgtgcgagcggctcccgaggcaggcggggtacctcgccaggcgctggcgctgaagctgtgccaggtggatgaacacggaatggaacacggaacggcgggagcagaacgaagggccgcggtttcatcaggacgaggatccgaccgcagtcaatgccctacccccggggcaccgcctgcttgcattcgcatctcagcatccggtttcccggtaacccctcccagccttccagggcctcacctgccctgcccgccaggctccagacgtccagacccagcaagggctgtcccttccctgagtaggcttcccaaggcaggtgtgaactgggcccacgagaaatcaagtcacgactggcaaagctaccggacgtgtgagtccccactgaacacaaggggcaggacggctgacttttattaagtggtgagtgcggctccacggagaaggggctccagtcagacgcacccatctgctttctcactgcctcagccgcccttctccgcagctggcctttcccccttcttgcttttaaaccaccacctctcaacgtatcataatgaagaccaaacctcgagactcagatgttccagaaacctgagatattagatgtgctttgatcacgtctggctcctcctcaccttctttgttcttgatcacatcaacaaacgctgtctttttagttattatgtaagcctaacaagtctttccctaaacacctaacaatcgactatcacctttttctcagtcctcacatacacaggcatacgcacacacaggcttgtgcacacagcaacgagggcacggcggagttccctcgcagcataactgaaaatacgccaataccctggagatctcaagttccggatttattaggcacactgttttcgaggcccatgatggagggcttcacaagctcattttacaaagagattttagaagctaccagtctgtagaataggccttcctgatggctcagcagtgaagaatctgcctgccagtgtaggagacacctgagatgtgagttcaatccctgggttgggaaaatcccttggaggagaaaatggtaacctgctgcagtattcttgttgggaaaatttcatggacagaggagcctggcaggttacagtccaggggtcacaaagagtcatgcctgagtaactaaacacacacacacacacattccatagaactttctcacgctacagggtacctccgtaaggagctgtcccattcaagagccaggctcaccttggtcagctgagacaggacggcacaggccccgaaggggcaaacaggcccagatggctccttaatcccgaggaagtaacataagccagtttcttaggggtcagacttataccaacgagggcccacattatgtaacaaactcactgggggaaaggagactactccttaaagagttcccgcccactgactttaaaaataaaaggacccagtgcaccctctctctcccatccccccggcagatgatgcagactgatgaagtgggagccacaagaggaacaatacttccataagcaagaggaaataaaacgaaaaggaaaaataaacatgagctggatcgggggcaaaaaaagggcaaaacaagcagaaatgatcttctgataagaacggtattacataatccagcgcctataacatggaaagccactttgcactgcaaatcacttttccaccaagaattaagaggcagaacgaacacaaaaatcaattaaggtccgaagaagggctccgtttcccctcgaggggcttgttcttatccaaacactaatgcaggtactgtcagcctgcctcctgaagggtattttttattatcccctgagccgctctgtccaaggagtgattttcccatttgagtttgcaagggaaggttaaataggaggagtagaatgttctttcacttataaaatgatacaatcgattccagtgcttcagactcaggaggcctctgagggtgtctcagcttcccaggagcccccctcgctgtatcaaggaccggctgctgggatgtgggggagaccaagcaccgccccttcctccagggcgaagagcatcactgctccaaccacccccaacaggaaccaggcagatggtggagagcaccagcagggtgctgggccccggggaggcacgagaataccattcacagaagcaatgagagcgggaaggatacctctgacccaaagggataaaacacaagagccaacgagctccctggacgagctgcagggcagccatcctgcctcacgcaggataacttagcatatacttgtcaaagcagtaagaaaaggggatggtcctgaaactttcacataaatgcaaacattcttggggagtggatcatatttttattattccatctatgctgcttggaatgcagtgataattttctaagaaacaaagtgttctcctttgtctcacaaaactgaatttctataccctgctgctgctgctaagtcgcttcagtcgtgtccaactctgtgcgaccccatagacagcagcccacaggctccgctgtccctgggatgctccaggcaagaacactggagtgggttgccatctccttctccaatgcgtgaaagtgaaaagtgaaagtgaagtcgctcagtcgtgtccgactcttagggaccccaaggactgcagcccaccaggcttctccgtccatgggattttccaggcaagagtactggagggggttgccattgccttctccatcctacaaacctagatttacctaaagaagggagtgggtatacttctttttttcccccctttggccgtgccaggtagcatgggagatcttcgtcccccaacccagaattgaacctgtaccccctgcatcggaagcgtggagttttaaccactggaccgccaggggtacacttcctttcctttggagtcaaaggacaagcactctacccaagtacaaaataaagggacacgatgggccgtgcgttctcgttgagggtgttcaccagtccctcgcgctgatctggctgagggaactgaggaggtgagcagagccggggccgcagagccgcggagggcgccagctcacgcccggggccagtccctgctgccacacggagcgcctttcccgaccggatcaggcctccgcgggcctgcgtcgtgggaaggaggcggaccagcagctactctggtctgcctgcccacctggccctgctgtggctggcggcgcagcgtcccggctcccagtggagagcctcggcgctgagcagccagccgtcccagcacggcccggccgctcaccggacacagaggaggcgccgctcgcccccacaacgcaagtgcctccctgccactcgagacgggaaaagacatcagaacttgacaggaacgagcacagggctgttgtccccaaataaagaactcacatcagcagagaatgtaaaaatgttatttagaactactgttctcagatgtttaacacaaaggagggattgttgtgccagggaacaaagtgatccagtattcacaaagcagggattctctcactgcacattctgtttccaaaacactcaggaccacagcaagttttccagttggggcaaagacgctacttctggaagcgggagaggagataacagaaatctttcacagaggagctgaaagccttcgaaggaaaagcaaagcaaatgtcggccctgaggggcggccagtgtggatggtgagctgacctgtccccctaggacgtggggggacgtgagggcgagcgtcttaaggctgcagaacatgctagcaacatagcatgggaactcaggaacctcaagcgttttttaaatttaactccttgagcctgggttccagaaggtgccaatgtaattgtacttcccctgggactgcagccaggagggaacaggccgtgcttctttattacacgtttttaaaacctgttttgttacctgcagggaggcagctggtgagggcctttatcgagctgggggctggggagcagggcggtggaagagtggcctttctctttggcatgatcaccctccgagctgcaaggtggaattccaggccagaatgaccaaccagaaagagggcgcagggtgtccattgctttctcttcttctcgtgtcattgtttttcctttccactaaaaacagtcgcgtccttctttatttctctgctccctttaccagaccctatgtttctggaaggaaatgcaatacacgggcaaagaccctggaaacctggggaaccagttcaccatcttaatcctgcctctgcaaccacgatggggtcaatgtcagcttctcttcaactcaacttccaaacaatcagaatgaaggtgcccatgttttaggataggcaaatctcaaatgtaaaattctaagtgaagtgcctacacacagtaggcctttgagttcaggggctgtgactcactcaccatggtaatctatccgccacaaatagagggttctatttgcccttgaaccatctctctggcaacgtactggcatgtttcctatgagtcatgattaaaatttggcacagcccaccgtaaaactcgacacttgtgctccaagcagtattttgttaatgacagggatagtggcaaaatcaactctgagatgaccttactgcattgccgcacctcctagcactgggacatcaagggcacgaccttaggactaagtccacaaaggaaaaaaccggaagaggcagaggaggaacgaagagagcgacagagatgcgagtcaggagattaagccccagctctcggtgcctctgaacagctttcacaatctcaagtttggttttttgcttcaaagaattagcatctatgacaattaagtaaaatttcagtaaatattaacagaagttgacatgatggaaattttaaggatggtcatccactaaagccttactactcgggattatgctttcttcatggtccgtgggaaaggacaccaacccagccaagtgcttacgcctcttacaggtaaagcctccaccctcccaagccgctcggtcacagctgtttctgggcacggagcgcgagcagtgccctgtgtgggggcctctccgcctgtgaatgagaacaggacgggtgccagcagtccgcaggggcaaaaggcagaggggcgctgcccacacgacccgggacactgtccacggggcgggggagggggcagggaggcgaggggcctgcagggcgaggccgcggggtgcttccgagggaaaacgcgcaccctcgcgggtgacccacggagaggagcgcggttgcagggctggcggggcgccgggccgagagcacggccgcgcagcacgtcgcacgccgcggagaggcccccgacccgcgccaggcggcccagccagaaccccaggcctcgccgctcagtcaaggcaaacagcgaagcactcggaagcgacactcgcgcttcggcagagccccggctcgggctgggcgcggcgctgggaaagagagggggctgctgtccccgcgtccactcatggaacctggaggagacaaaaccacggtaagggcagccgtcagcagcccaggcagctccctgtgtcgctgcgcttggccgccagcaacccgcgaggcaggtgctaacagcccgtgtgaagacgccacccgagaccgcagaacgagtcagagatggaaccagggctgagagtggggtcaggtcgactccagaatctgctttccaagctcttacactctactgatttgctctctgaaacaactttatacatacatgcatgcatgtggaggagaattttataatctaggcatggggcaggccagccttggtatgactcaaactccagagactataaaagaaaaaaaaaactgataaatctgattacaggaaaataaacattttctgcctgggaaaaataaaccctaaacagagacaaaagataaaccagagaactattgggaacataaatcacagacaaaggctaaattcattaacatataaggaatgcctacaaaccaataagaaaacacccaacaagaccgaatggacaggcagctgatataaaagaaattcaaaacaattcaaaacacgttaaagacaccaaactgtactcatcataagagaaatgcagagcgaacaatgtattagggttggcgggcactgaaacgttttatttcacaagcgttagtgagaatataagaaaagaggcgcgctcataaattactaacgagagactagatgcatgcagccgtcaggaggacagtctggcactatctatcaaacttataacttgcctttaccctctgacccaaaattccaattccaggattttatccagaggataaactcacacacgtgcaaaatgatgcccacagaaaaccaatcttcacagcaatgcttgtaccagccaaagtctgagaaccacctaaatatccaccccaaggagactgattaaataaatcatggcatcttcccataatggcctattatttagccatgaaagaagacaggaagctcttaatgagctgatgcaaaagaagccccgaggaacacggcaaagccaacagagcacagtaaaaacggcaagagagggtatgtgaccaaagcgccaaagcacaaccatgtagcgcagacgtgtgtatctgtgtgtgcctcatggagagacactcgaggggctgacaacactaggtgtctacagggaagggaggcggtggctggaatgcaagggtaggtgggagcctcccttgccattgtatacttcatatctttcagtttaataatatgtactcatgcctattcagaaaacaagtgtgtgtacatatatatatatataaatatacataatatatgttacgtatctagagaccatttgcacttcaacaagcctgggacctgacctaccatcttacctccaccctccaccagctctttctgctgaattccttctcaatgagttgaatcttgggcttccaagagccccagtcagaagtctgggagtcatcccggctgcaacctctctgccctccccctgagccaccaggaagtatatgctgtgaaaagaaggtgaaagtcacccagcagtttccagctctttgtgaccccatggactgtactccatgggattctccaggccagagtactggagcggggagcccatcccctctccaggggatcagtcccaacccagggactgaactcagggctccctcattgcaggtggattctttacctgctgagccacaagcgaagcccaagaatgctggggtggggagcccatcccctctccaggggatcttcccgacccaggaatcaacccggggtctcctgcactgactgtaggcggcttctgtgccaactgaggtgccagggaagcccgtatgcactggccactgggcggtaaagaactcgcctgcgctgcaggagaccccgggttccgcccctgggtcgggaaggtcccctggagaaggaaatgcaacccactccagcattcttgaccggaaaatcccgtggacagaggagcctggagagctggagtccatggggtcacagtcagacacgactgagcgaccgaacaacaacacacagtgtactccctcctccagggggtcttcccgacccaggggtggaagtcaggcctcccgcgctgcaggcagatcctttcccgtctgagccaccagggaagcccgttcacacacatacatatatgtatagatatgcactgcacacaaatcaaaatcaaatgccaacagtggcaaaagctggcttctggtccagcctcgcagccagtgggctagtgagaaaagctctttcaccagtgttcttagtttcctcatccataaaataggaatgataatccttcctcttgtggttttgaggaataaataaatgactctacataaagcccttagaccagcgcctggcacacagcaaatgtacacaagcgtcttttaaaatacgtgccattcaagctgagctcagaaagatctgcaggactcagaccagaaagagggaagcgggcggaagcaaaatgagccactcaggaggcacagcaaagggcaggggacaggagagctcagggccaagtggagggcatcctgcgggggaggggcgaggagacggggctcaaggagggagcgtgggccaggctggaccgtttttctgtaggggaccggcagcaatcggagtggttcaggcaggggaattccgtgatcggacaggctttcctagaaagagttctctggcagtggtctggaagccaagttggagaggcacgcactggggcagcagaggggccacttagaggctgttgcagcagctcaagaaggaacgaggaggctgtgatccaaaacagaggcagcagggaagcgggagaaggagcatctgggagacacagaggaggtgggacctactgggctggtggccccgggcgggggagggtggacaagaggcaaccaggaaggattcccaaaggtctgtcttgggtttctagaagcccaaagatgcagctcattgagataaggaattcagaagagcgagctggtggggggtggaggtaagagagtaggtgaggtcccaggtttgttgaggttcaaatggtctcctaggtaatccaaggttagctacaggcatctacattcagatgatggatttgggcttagcctgagcaatacagacaggtctgtagtactccagggttctggactgtggcgaaggcagctgctaccaagcggcaatggtctctctggtccaagtgaaagagttttgagaagacacattacctgtgatgcaagtaagacccaggctcctcccaccatccctgtcttctcctatccttccctctctcctttcttacactccctcctctctctttttctctctacccacctcctccttcctttccaaaaataggaaaaagttttcataagaggtttctttaaatgttttgtgtgaagcaacctacttctgacagtccctgctaacgggtgatggctgaagcctttattttttccagcattcctgccccggcttttgcttctgtctctgtaaagagcagaagtcactaggaagttgtgacccacttgatggggagcatcccagaagacctcattttcccatggtctgtctcagcagctgcaccacctaggtgtttcttagaaagggcggtctatggtcttctctgctgcggaggggtttcggagaaaccaatctcacctaaagaccacctccgaaggattttactaagagccatgagaactgacttctgaaagagtgtgcacttttctactaaaaataaaattatgtttaagcaagatttctggaacaaccaggatcctgggaccaggattcaagagccagttctgctatcccccactcactcactcacatgatgcaaagcttctctcagctttggtctcctcccctacaaaattgggaccaactactagaccatctccagatctccttctggctctaaaactgtgcgagtctagaaggagggtagaaactggtctcatgacactgtgggctatttcagcaattcagaagtgccagttaaatactgaaggcaattctgtttttagaaatcagttgatttcctgactggacaatagaatgcctccggtttcctcactctccgtgtctgctgcaatggcacggacacttatcccaaagggaagccccagcgactgaggtacagcaagtgctgctcactttccaaaagccctacttgccaaagaagccacctcttttcctggagaaaccacagcgaaggactcaacgggagagaaaataccaggcaaggcatgggtgaccactcagtgtttaactatgtaaattacaggcttgcctttttaaaacataagacagaaagttcagtctaccaagagatggacagcgtattttcccacttgtagagatttatgtgacctgagagaacaagcaagaaacacggacaaggaggcctaacctgataacagactgcctgcctcctctctccctctggggtcacggcgtcgtccagatgaattcagtcgttacagcgagacaagactcagcataaacagccacgagaggctgcacgtagagctcaacacaaaaaagaatatccaggagaaaagtgaccattttttaatctaaaaagacttctttttcccccaacgtgtcggtcaaaatgtgattttcctagaatctgtgtactgtcagtaaaaaggaacacgtcagcatttaattgacttaaaatattgtatcttcaaagatatcagctaatgtacccttataaacgaaagcctggcttagattagtttgaaatgcatcatcctcaaaaataatttcagttgaaacctgatttcagcagcgtgctccagtaatcatctagggagaagattaggtatctcccaacatgtacagcgtatgcactgttactcacacagcaggatagaaacgagcggtctaagttactagaaaccagatataatttaccggtgttttgaggggaggcacagatatgcttccatctttgaaacgtatacatgcggtttacattgttcaccacgcccaacaccactcaaagcaagagagaggacaggacagactgaccggtaaactcagatggtcactttacctaccatttccacaaatgtgggaaaggccgccgactatctgggccgcgggtaccgctgtcaactgctgactcctatggagggcaggacagcatcgaagtgccaaacacgctcacttgcagttgcaggcaccctgcctctaggatttctttctacggacgctcaaaataatttaatacaagctatccaccgcatcattatctgtcctagaacaaatcggaaacagtctaaatatctgtcagtaagggactagtgaataagccataaacaaagaaagagggagcgcgctcttaacctactcatatacactgaattccaaaatggatttaagtgaaaagcccacgtgcagaacagcatctatgcttgccaccctctgcatgaaaagggggaaataatatatacacacacgtgcatgcatgtactcaaatgcacacccatctatgcctatactgatgtactgaatacatgtgtatacacaagaattaatgcacacatacgtacaagacgctgataacacagagactgctgggaaaggcaaccaggcgctcgggcagaggaatggcggggggctgggaggtcccctcccttgcagaccttctaggaccttttggagtttctgttcgtttttttaactgaagtatagttgatttacgatgttgtgttagttcctagtgtattgcaaagcgattcggatatacacacacattctttctcacgttcttttctgtacttctatgcgctgtactgcaggaccttgctgttgtttacccgttctgtacataacagtttgcatctgctagtccctttgaaattttgagtcatgtgaacatgttacctgttcaaaaataatttgacaaacataactaataataaattgttcaccggtaagcagtgaagacacactctattactacgttataatatgaagggccatattttttaaacactaaaacatttaggccaagattggggtcttttcctactttttatttttttaactttttattgtatattggagtatagttcattaacaatgttgtattagtttccggtatacagcaaagtgattcaaatatacctacatatgtccctattctttttcaaattcttctcccttctaggttgttaaataatattgagcagagttccctgagctataccataggtccttgttggttatcctttttaaatatagcagtggttttttaaaaataaggtcatgacgaataaaaatgaggtgatcttcctctctattctcttggagctcttgtaaaataataaatgacatataacagtttggaggaaaaccaattaaagggatataaatcatcattaacccccttccctagatgaatgacaaagagacacatgttctaattaacactgagtaacattgtgtaaagagcagtttgcaatggaaacgagcagatggcaagcaagcatgtgaggtacgggagtgcaagacagcatgcgcggtctgacactgcaaactccacgcaagtgaaaggaactatacctgagtgagagctgtcccccattcaactttctctggtttttaggggcatctgcggggggcggggggctgctctctgtgcccagtccccacggggcagacactgttccggagcccagcccactctccacacaggcaaacccaccacacaccaaccacgcagccaccctcttacaacagaaagatttcctatccccaggcgacggatggctccgttgatttcaaaccaatctagcatttcagttcaacaaaaggtttgggacatcatcttagagtgtgatgtaataagagctgacccagaggtttatgctttaacaaccctctcttttctttcctttgaaacagagatttatgacaggaggcagagaaagagacagagatcacagggttgatgaaactatcttaggaagcacagagcaggtaccaaggggtacatgcttctgaccgctctttgctcaaaggcagaccaagtaaggaaggcggctcagcttcctcttgtttacaagttcatcccattcttaggcttttctctgtggaaacacaagatgcctcagcagtggtggtttcattagcggagccctcagcagagagccagggcctggctccccgagtgagaggcctcagcccagctcacagaggctatttccctctgtgcccactgacccaggctggggtgacggcacagttcagacaggatgccctcccagagtcgtgatgcaagcctggaaaagaaaaaacctgttcaagatccaaaaccaggatctgacaattcagaaccacagagagtggctaagaccctggcctttgcagaaggtatgctgcacttacacatacgtgacatgagcagccactgcatactcagtcttagactgttccacctacgtccagggtttcaacgcatgttccgaagtgaacaacagctggataaaaaacataaaactctgagtaaacaccagatacagttcctgctctccaggcaaaaaaagcaggagacgtttttgtttgtttgaatttgggacttcaaataactgctcaaaggaaaaacaaaaaacatagatagtggggcaaccagctatatgaacaacatttacggccaggaattataagtataaatgatttgtgcaatctgaatttttggatttaaactgacactttaattcctatgtttgagaggaagagatatttattacatacatatgtacacacatatgcagatttatgtataaattttatacaaagccatttccactaagctattatttaaagtattgggattcaaacccaattcctttctccatctgagacaacagactcctctggtttgaggatatttttaaatataaaaactaattatcctatctcactgcctataaactcaatttctatttctgagcctgcttctgttgcatgtctcttggcagtcccttgcattatggcttgtttacaatccagtctcaaatcacagcaaagacagggatcaaagaaaaataagcttttcaaccttttaggagggtttgggaatgcagcaatatttccataatgctatatatttttaaaaaatcaagtccactttctatgaaaggataattctttttaagcggcacattttatagacaaaatgtggagtgtataaactggacgcagaaagagcgaggctaatgccagtgtcagaaggccctgtcttggctggattttcccacaaaaccaatcaatcaatgcacgtggagatgtatccaggcagacttttgcaaaccagggccgttttgttttgtgtcagcccactaagagcttccaaggccattctggactggattgcggagtaggggtatgcaacgtacaacactctctcttctcaacgtgacaaactccttgaaaagagaggcctccacagacttgtcaagggaggcaaattaacaagcacaatttacgctgcccagctggggtggtgaaggtcaaaggcaaaccaaaataaacggacaacgataaagaatggaaacagcctatgcctaccgaaaaaaaatcctgtgaagtccattttactctctcctcttctccgtgggcttgcctggcggctcaggtggtaagaatgcccctccgtgtaggggttccatcctgggtcgggaggatcccctggatggcagcccactccagtgttcttgctggagaatcccatggacagaggggcctggcgggctacagtccatggggtcgcagagtcagacacgactgagtgactaacaggctctgttttcagttctgtgagcctctcttcacaaagttcctcattcgagtatctgccctcggaatactcgcccagccactgatccacaggctcagcccctggcgtgcactttagttttcttatctcagagacgcgggtgcggagcaaggtgagtaggctccttgcagctcgaacagatcacggtggtgagcacaggcgagggttccccgcccactctgacaccccccagacctcctctggtctcatcacctctgaggcttgtctccactggtttctgggccctgcagcaatggcagtggacaaacacaagaccttctccagaccctcctggtgaagatgctgtctgtttcctgcttttacaaacatctcatagcaaatgagtagtaaggagaggatacaaaggatgaaccaacaggatcaagagggtatgcctccgaaaggaagagagacacagctgggagaagggaaaggccacttctggaagtgctggactgctttttcaagaagggatataggaagggatataggaagggatataggaagggatataggaagaccgtggcatgctctgctcctggttcccacttgtgaggctctgactcttcttttccatcccccattaagaccaggagagacacagagagaatttttctgtcttctggttaagccagatgtggatcatttcttcatacactgaattctgagacttcccgggaagcattaatgaggcccatctgccatgccacttgacctcaattctccctatttaattagtgggctgtatgcttacgtatggggcgtccctggtggctcagtggtaaagaatctgtctgccaaagcaggaaatgtgggtttgatccctgggttgggaagatcccctggagaaggaaatagcaacccactccagtagtttttcctggagaatcccatggacagaggggcctggtgggctacagtccacaggggtcacaaagttggacatgactgagcaactaagcaacgacagcaagcggcatcttaaataacacttctccaccctggagagccacaaaggctggtgtccggattcttcccaccttcattttagaagcaatgaagttttcttcaacctgccacatatgagagaaggcactgggtgtggagccagcaacagttctgccatgcactccaccttcccccagggaagaaacttctaggcgcccgggtgaatccaggtgtttgtcgacctaactggttgctgttgttgttcagctgctaagttgtgtccaacttagcccgactcttcgcagcatgacaggctcccctgcccttcactgtctgccagagttggctcaaactcaaatccgttgagtcagtgatgccatccaaccatctcatccaagtccacatacacccaagctgcaaagagcatcaaggacccaaaacattccctcaccaacatactcaacagcagaaacaggtccggccgcacaccgcctgcggggccctcggggagctccgttcctcggtacgctgctgtggtgactactgtgacgtgcacactgctcatttgctccaacctcctttcatatcaaaaaaatcaatagataatttttgatagccaatgtgtgggtgatctgaagaccattaagaactgaaagtgaagtcgctcagccgtgtccgactctttgagaccccgtggactgcagcccaccaggcttctctgtccaagaatactggagtgggttcccattgccttctccaggggatcttcctgacccagggatcgaacccaggtctcctgtgctgcaggcggatgctctaccctccgcgccaccagggaagccctgttaagaactgaggtcatgttcaacaatgttagatttcgtgaaaacacctgcaaactctgtgataaccccgcagcgtcctttgagcccccaaccctccaccacgcacggcacgttccgccagacatgaccggtactgccctgcaagccgacacccgtggggccacgaggtggaagagagcttagaacaagcccttcccctctggtagtaaacaccacagagccctgactcttctagaacatgttctgagagcgcctcggtttcatgattaaacgagttatactgtcgttgagaaacaaaagatgagttttaagtggcttcatgtgcaaacagcccctctcggagaagcacacccacgacagttcgtgcagttttctttgttattgttagcagtttccagttgaggacttatccaattatctatctattgtctggcaggccttgcacggggattccagttacaggaaacgcttctgctttcacagaccccaggcaaaccctggagcagaaggcagcacagccaagagggtgcgtgtgcgcccgaggaggtcaggagtggggggcgcctgtggggccaaacaactcacgtgtgaagttcagctgcaaagctgcctccaactagtttgcatggatttgatcctcactgtaggaagcggttgaaaatggattgcgggcgtgaatgggaaggtaccgattgaggtgactgccaacacctgtacctattataaagtgtttggagttcagagggccccacagagatgccactgtacagcagacagcagaattctgctgagatgtttcagggaggccctgggacgggcgatttggatgctccaggacagacagatggactctgggccggaaggactgaggtcagctcacacctctgcagctcccctggggggtgagggggctgagttcttgctgagagactctgaccctcagtctccactccgtcgtgtgcaggagattgaagcacaggtcatgggccttccccggtggctcagtgtcgaagaatccacctgccgattcaggagacatgggttcgacgcctggtccgggaagatcccacacggcccagagaactcagcccgtgtgtcacagccactgagcctgcgctctagagcacaactcccacagcccgcatgcccccctggagcccattctctgcaacgggagaagcccgcaccctgcacctggagagcagccccactcaccgcaactagagcaaagcccgtgccacagtgaagaccctgcacagccagaaatcagtcagtcagtaaaactgttattagacacacaccgagatcccttctctactcaaagctggcttctcgctgcacatcacacacaaaacaaaacccaggaagcctgccagagtctaccaggcccacctgccgtgtccccgggagcagagacgcctcagggggctgacccagggctcccacgacaactgaggccagcagcttcgctctgagggtggacccgaaatgtccagggtggtccacgcagcccagaaacaccccacgtgccctgcagtttccagcgcccgctggacattcccaatgccctgcgacacgtcaacacgaagtgctttccctgcgatgttcatgaacgtccaaccgcaaggaatgagatgggaggacgggctttgttttgtttggaacctgactagggagtttcaccatatcagaagcatcacatcacgaagggcagcacagagcgtcaccgagtcacgccgtcacacccgcgggctgcctccatcgccaccacgggcccagggagcctacggggacgtgcggaagccacggcgacgtccggggcaggcaggcctcgccgacgtgtggatactgcctatggccgcctctcctctgtatgtccgggacagcgcagttaaggcgtcagagggatggctggtgatggatgtgggtgggaggttgcattttgcacagatttcgctgcaggagggtgaagcagtgtggctgcagatgggctatggaagcagggtttgggtcttgggccccttctccccgccacactccggggcccccctcaagttccgaaggcgcctgctcccgcccgaggaccccgtggcccccctggacgggtgcctctcacacccataggctgcctccttgcaccctcccgccacccctgctcccctttaaactttctcctccatcatctatcgactttctctgccaccagaaccacgtctatgagaccaaggacttgtctctcgttcctcggcaccaggagcgatgccgccgcgtgaaggcagcttgtgagcaccttctggcaaacaggagtgggggagttcggctccacggagcggcgcgccctccaggacagcgagcccctccccgtgaccagcgctgcaaggcgagcgcttcgtttccctgaccctgcttctcgcgctgcaccctcttcagagtcaaagcgagtacgagagcaagcagccggggaggaggcgcagcaaggctttcaagtggccgtctcttcaggacaggccgtgcgggacgggctccgaggcgaggactcctgtccaggacaccctgcccgcagacacgccgcggaggccaaggcgggactccctaagacgccacagcccctcaacaagaaccaggctctgcgactccacgcaacaaatgcccctcgaaaagcaaaacagacggttcagggtggccagatcccggctggcgatggacaaaccatgcccgccttcactccgttctgttcctgaccccctgttctctgagatgaattttattcagaaattatcggtaagtcacgttcttcgaatcacaatcccgacacgtatttttgttgaagttggtgagctgactgtgaacgtcacacggaagccaaaatacacttaaggaaaaggcagtgaggccagcagctcagccgactggaggtcaaagccccagaaaggaagagagggctgcaccggcccaaggcggccaggggacgggcggaacagagcagagagcccgtcagcagacccccacacacagacgcggcacttctgagaaatctaacactgcagggtagtaggacaaagatgctctccccagcaaacaggggtgagctggctggataaccacacgaggaaaaagaaaaatctgcccccctgccccagctcaaacattcatataactcaattcttggtgtagtacataaatgtaaacgggaatggcaaaatgataacacttttagaagataatattaaagaaaaatcattgtgaccctgagatagcaaaacacaagcagtaaccgtaaaggaagagatgaccggcaggcaacgctgaagcatggcgactaacgggccagcattgcgcaacggagaccagaggccccgtgtgctgcgactgagacctggcgcagccaggtaagtaaatattaaaaaaaaaataaagaacttcttttcatcaggagatgctgttaagagagtaaaaaggtaagtcccagagggggagtaagatatttgcaacccatatgactagtacttggatgcaatctcaaaaacgacagaatgatctctgttcctctccaaggcaaaccattcaatatcacagttatctaagtctttgcccaaaccagtaacgctgaagaagctgaacggttctatgaagacctacaagaccttttagaactaacacccaaaagagatgtccttttcattataggggactggaaggcaaaagtaggaagtcaagaaacacctggagtaacaggcaaatttggctttcgaatgcggaatgaagcagggcaaacactaacagagttttgccaagaaaatgcactggtcatagcaaacacccacttccaacaacacaagagaagactctacacatggacatcaccagacagtcaacaccgaaatcagattgattatattctctgcagccaaagatggagaagctctatacagtaagcaaaaaacaagaccaggagctggctgtggctcagatcatgaactccttattgccacattcagacttaaattgaagaaagtagaaaaaaacactagaccattcagctatgacctaaatcaaatctcttatgattatacagtggaagtgagaaatagattaaagggactacatctgatagatagagtgcctgatgaactatggaatgaggtttgtgacattgtacaggagacagggatcaagaccatccccatggaaaagaaatgcaaaaaagcaaaatggctgtctggggaggccttacaaatagctgtgaaaagaagacaggcgaaaaacaaaggagaaaaggaaagatataagcatccgaatgcagaattccaaagaatagcaagaagagataagaaagacttcctcagccatcagtgcaaagaaatagaggaaaacaacagaatgggaaagactagagatctcttcaagaaaattagagataccaagggaacatttcatgcaaagatgggctcgataaaggacagaaatggtatggacctaacagaagcagaagatattaagaagaggtggcaagaatacacggaagaactgtacaaaaaagatcttcacgaccaagataatcacaatggtgtgatcactcacctagagccagacatcctggaatgtgaagtcaaggggccttaggaagcatcactacgaacaaagctagtggaggtgatggaattcctattgagctgtttcaaatcctgaaagatgatgctgtgaaagtgctgcactcagtatgccagcaaatttggaaaactcagcagtggccacaggactggaaaagggcagttttcattccaatcccaaagaaaggcaatgccaaagaatgctcaaactactgtacagttgcactcatctcacacactagcaaagtaatgctcaaaattctccaagccaggcttcagcaatttttgaaccgtgaactccctgatgttcaagctggttttagaaaaggcagaggaacaagagatcaaattgccaacatccggtggatcatggaaaaagcaagagagttccagaaaaacatctctttctgctttattgactatgccaaagcctttgactgtgtgggtcacaataaactgtggaaaattctgaaagagatgggcataccagaccacctgacctgcctcttgagaaatctatatgcaggtcaggaagcaacagttagaactggacatggaacaacagactggttccaaatcaggaaaaggagtatgtcaaggctgtatattgtcaccctgcttatttaacttctatgcagagtacatcatgagaaatgctgggctggaagaagcacaagctggaatcaagattgccgggagaaatatcaataacctcagatatgcagatgacaccacccttatggcagaaagtgaagagctaaaaagtctcttgatgaaagtgaaagaggagagtgaaaaagttggcttaaagctcaacattcagaaatcgaagatcatggcatccggtcccatcacttcatggcaaatagatagggcaacagtggaaacagtgtcagactttatttcttgggctccaaaatcactgcagatggtgactccagccatcaaattaaaagacgcttactccttggaaggaaagttatgaccaacctagatagcatattcaaaagcagagacattactttgccgactaaggtccgtctagtcaaggctatggttttcccagtggtcatgtatggatgtgagagttggactgtgaagaaggctgagggtcgaggaattgatgcttttgaactgtggtgttggagaagactcttgagagtcccttggactgcaaggagatccaaccagtccattctgaaggagatcaaccctgggatttctttggaaggactgatgctgaagctgaaactgcagtactttggccacgtcatgcgaagagttgacttattggaaaagactctgatgctgggagggattgggggcaggagaaggggacaaccgaggatgagatggctggatggcatcacggactcgatggacgcgagtctgagtgaactctgggagttggtgatggacagggaggcctggcgtgctgcaattcacggggtcgcaaagagtcggacatgactgagcgactgaactgaacggactagtgaaaggtagtatggaagaggtaaaggatgcttggaaatccacaagaatgagacaaggaaacacagctgcaaaatgggcaagagacctgggcaggcgtggccagacgaggacagccaagaaacctgggtaaacaagtggtagtgagtaattaataaccagaggaacgtgaaaagtaaaagcaagcaaacaacaatgctgtgatacgattacgaacatagctggttttctaaaaataaagagactgacaagtctaaggttggagggtaaatgaaacatcaggaactctcatacataccaagcaggaatgtaaactgatataaacattttggacaactgtctggtgttacacctacaacaatcccaccacttgatcggtacccaacagaaacgtggtctacgcagacaatggcatatgattcagcctgacagaggaaggaagctctgggactccttggcagtccagtggatgaagacttggcctcccagtgcagggagggcaggttctcccctggtcagggagttgagatccctctgccctgaggccaaaaacaccaaaacataaagcagaagcaatactgtcacaaatttaatcaaaactttaaaaaaatgatccattcaaaaaaaatctttaagaaaagaagaaagttctgacgcatgctccaacgtggatgagcctcgaagccacgctaagtggaagaagccgtcacaaagaagagtccactcacaagcagcgcctcgagcagtcaatcctaagaggcaggggctgcaggagttgggggagagaggatgggaagttaagggacagggaggttctgctttggcaaataaaaaaaagaaatggtgtcaactgtcattgcaagacacatccccaaaccagagaagttaattttaacatgttcccaagagagaggagccagcaggtccacatgggctcgaggctattcagctgtccatagtttctttttttaattccatctaatactcaatataaatacctaaaggagtttcttatggtaaaattagtccacagcagtaactaatgttatcagatttactaaatattctatctgtactttgactgtagccttcactggctaaggtgaacccggtgctggtcaggtaaattaaagatggtagttgagtgaaagggcattgatgttacctgacttatcactcatttctgttagggttggtatcccaagttcttgatatgtgtaattaagaaagttaacttcaggtcaccctttgatgatgtctaactgcaattctgattatctttaaacagcaattccagtccccgagatgcagctagcagttatttctctcatgtgccgaaggggaggaatttaccctggcggtttatctgaattgcttccaatcttcaaaaccccagatttatatgcattggcctacagtggccttgaaaataatgtgcccaaacacccagtttaacccatgctttaaaaagaaagcagacttcctttattttccttttttttcctcctgaatggaggtccaatttgtaaaacatgtcacaggaatggaaatcttattttcaagattagctttcacacacagctcaataatacttcagacatcagatttcgcagaatcagattacagatcttaccttactccaaacaccaaagagttggcgtcgggacccttccatgatgccctaatgacttctgcgacaggcagagtctgtgtaatcaccaagagcagaatcatgaatgtcaaaacacaggccctggctcacaggaaaatgtttaataaatggcagttaaaaaaaataataacactaacaagagctgcaagtgcatggcccacgtaagctaaatgccttattccatcttagctgagcagattttagaacagtcagtgattccattccattttgtaaattatcgagctgtaccagttcagagattcttcggaaactcaatttccaggcatttggcttttgttcctgggatttccactgctttagaggatccagctttaatgggctctttctgagaaaccctccattggttctgagaagtacttttattgaatgctccatttaacttcattttgcaattaatgaaactttcaagacatatttcccctcccctgttttctattcaagggattttttcccttgccttctgggtaattaggaccagagcactactcccactaggatcaggccttaaatatggcacccaaatgccaaagcagatgtcatttgcggagttctggaaagcccatctctcagatttaaaaacattccatgtcataggtaaaggtctttggttggtaggtaccaaacagatcactttctgatttcagggacattcaaccaacagtaaagctttttgagttttccgtctttcttgacaagagtacttaaccttctccagtccaggagctggactcttccctgcctctgcaacttgaccagtttggtaataaaacaaatcaccaatttggttgtttattttcttagcctgaaaacgttcgcgtgtttaactgagggccagcgtaccgcatctgctcttcttcttccaaagttttaaacaaacaatcactgaacataatcagctaggagcaatcctctgctcgcgtatcctccagtctggaaacacagcagaaaagagtgtgatttatagggacccgtcgcctctccaaattactgcccactgtctggtgaaaaaaccgtttcaatcattttctcagtcacccaatgcacgaccccagaattttcagttcaatgacagtcctaggaagtcacggggccactctggcccggtccagaggacgccgagacgcactcaaacgtgggaataaaccctcccacgggacgctttatacttcctagttttaggtagatcaagagcacttttaaataaacttggcgtttgtttcctattccagtggaaaatctgacttcagactttgcagtgacagaaaaggagccttactttcctgggcaaccagaacccagttcttgtcacaggaactgcatgggtggacaaaacggcaacgatgcccgtttcacagtcctgatgaaagtgatggctcagccttgcctgggggagcatcttggaagctttgataggacccgattcctgggtcctctcctccactcccctgcctccccaacattctgattcaattggtctgagagccggcctgggcgctggaatcccttaatcggggtacggttgctctatactgttgtgtcactccgctgcacagcgaggtgaatcggccgtatgcacccccacgccctccctgcggcgccccctccccgccgcccagccccccatcgaggccgaggagcacctgtgccgtgaggtgggctgccacccgctcgctgttgtacacacggcagtctggacattggggtcttaaacgttccctgggtgatctaatgtgcagccaaggttgagagcccccgtgtcttagtctatccgggctgctattacacaatcctataggcggcgtggtttataaacaacagacatttatttctcaccattccagaggctggcaagtcctagattaaggagccagcaagctcagcgtctgggcagagcccacatcctggtgcgcaggacagtctttgtgggaaggggcggtgggggggctctctggagtctctctgatgagggcagtgatctctcagtcttgagggcgcctccctcatgacctcttcaccagccccaaacaccgtcaccttggggcttaggtttcaacatatgaatctgcggggagaatgctacagttatccagtccactgcaccagtgctcaagagcccactgccaattcaggaggcgtaagagacccctgggtcgggaggttcccgaggagggcgtggcagctcactgcagtgttcttgcctggaaaatccaaaggcagagaagccgggtgggccaggccatggggtcgccgagagcgggacacagccgaagtcactgagcgccacacacacatgggccagtggcagggcccttgggcacggagctccgcgacgctcagctgaggagctggtgctgcccagaagggaaaccccgcccctggtcagtcatggcgtccccccaactaagccaaggaccctcacaccaggacaaggagggtcacggacagtcctgcagggctctcgagcaaaaggacccagatgtacccatcagtgtctcctatttggggccccggaagtagacattcctaggatctgggttgtgccaaaagcgttcaggctcttcaggaggtcattcacaaggtggtctttgctagggtggccctggatcctgtaggcctggaccagactcagcctttgcaatagtgacagggaacacaatcagctctgtggaattttaaatccaaacaaggcagcttcagatctgtgattcaaaagcaaaaatgttcagagccgagaactctgtgcctccctgatatttgagcatcttccttcaaagcggcatgggggcatcttgactagacttttggacgcagtgcacgcgggtcgaggacgggggaacgtggggtttgctcagagctgtcctctcctgggctcacggaggcgcctgcagctctggctccagactcaggacgccggaggggctgccccctcaggctccgctgcagcgagtgcggacgtggtgggagaggagagaggctctgcagacagcccagggcgcgggggttctccaccctgcctttcaggaccctccacagctggcctacctgcagccgcaccaccccaggcacagagaggggcgtctgtgcagctgagggagggcaggagactagagaaaggacgcttttaaatggaaaaccaaagcctatgaggggagacttctcacccgccagagagccctgggtactcagctgtcccggccgggaaggaaggctgctgtccgctgctggggaccactgtcctggggactggccgggggaggcagagaggtgtcagtgggggctccgtccttgacaccttctctcgaggaagcgagcctgggtggggagaggcccctgcgactctccagaccctcaccagggatgcacggcccgggggagcttccctgggagagagccaggtgcagccggcaccctccttgtgtcttggtaaacggaacacgggcagagacaagctggaatgggtgcagagggctggacgggctggacgcccccggggctcgtgtgggccacagactgaacatgctcagccgcgggctccggctcttgccctggatcggaatcccgagcgtgggtttcacagacaggctcagggaggcagcgaagcgggggcgataccagcttcgggggaggggtgcgctgcctctcagcatgggcttgaagattctggaaggtcaccgagtcaacagctttagcaagcattctctgtgatcccaggcttctgttggcaactttgatttgacagcacacaagggaattgatgggggtgagggatggggaagggtggtggtcaggtgcccacgccatcggggggcctccccccgactctctgcaacagcaggctgcctggctgtgtcactgcagggagcccccgctgctctggctctgcagacccaggccgcctgccactccgctgcccgcggtggctgcttccctaggcccctccactccttctgccccagaagctccagggcaccactgtctaataagagcgacacactgcctttctggcctcctcgagagtcactcagggtcctctttaggagccagcctttggaggaacaggattcttctagctgggtggggagggaggtgggagggggctcaggatggggggcacacctgtgtacccacggccgattcatactaacgtatggcaaaaaccatcacgatatcgtaattatcctccaattaaaacaaatttttttaaaaatgaatttttcgggctaattactttatactcttgcccagtcaccagcaaacggaagttcagagaaattaaggatttcttgaggtctatgatagagatgcattttagaaagatatggcatcactgaaaagaagggatggacttggatcaggtgttcaaagagaagaagaccaatttatatgacattttggagaaggggtgggaaaaagtcagtggttaccaggggctaaggatggggggtggtttgactacaagggggagcatgagaataaacatttttcaggttaaaaaaaattttttttgactgctccatagtgggaatctcagctttcccaccagggactgaccccatccttgcgttagaagcgcagagttgtgaccactgggccaccctgaagtcccaggacaacttctttagggcgaggaaactgtcctgtgtctgattatggtgacagccacacctccatccctctgtcaaaactcaccaaactttacacaaaagtgaactttcctgtatatcaatatataatgacagggggaccaactgagaggttagcgaatggtccagaagtaatgagaagttgaattcagcacaagcaggataaaaaaggggggatccggatgagagagatttccgagggggaattcagaaagacggggcctacgtctgaagaaggggcctcagaggtgcagacgtgtagaccaggagaggacctcccaagaaagatctgcctccagggcagctctaccttaccgaggagaaaactgagctgaaaatggcttaggggctggggctttgtctgggcggatggtgatatcattaaccaggcagaacagaggcgggaacagtgggttcaaggaggaagctgatgagtccacttgtggatattttgaatttggaacattgatgtcaccaagatttctttttttagttttcaggaatttgaaaacaaaactgttgggttttggcattgaaagcaatctctccgcaaacaccatttcacagtagttacaataaaaaaaaaaaaaaaaaaaaaaaaggaactcatgactctgaagccctacatgaaaacagtgcatcagagcagtctgagcttgtgagccagtgaacaacagtcattcaggacacaagcagagaactgtcctgatctgatccagattttaggcacattctccattaacgcatttgtcattaacattgccatcaattcttttccttcttaaatttttaattggaggacaactgctttacgatgtcgtgttggtttctgcaacacatcaacatgaagcagccgcaggtatgcctacatccccagcctcctggaaccccctcgcccctcccagcccactccacccctctaggctgtcacagggcaacttcccactacctcccactaccactatctaataacacatggtaatgtatatgcttccacaccatattttgatgaatccacacaatagttttttcttcctcatccataacatacagtttgaactttgaaaataagttgctttccacgctatggatgccaagatgtaactcactgctgttttgtttttgcttttgctttatgctgtgtgctgtgctgtgcttattagctcagtcgtgtccgagtctttgcgaccccatggactgtagcccaccaggctcctctgtccatgggattctccaggcaagaatcctggagtgggctgccatgccctccctccaggggatcttcccaaccaagggatcgagcccagacttccagcattgtgggaggattctttaccatctgagcccccagggaagcccagggatactggagtggggagcctctcccttctgcaggggaacttcccgacccaggcatcaaacctgcattgttagtggattctttaccagctgagctaccagggaagcccttttgctttacaacatgtagcaaataaccaaaggaagatgagcacggacttgcttctagcaaactggcagctgcctgccaagagtccaatgctacagataagactggatctaggggacccctgtcaccatttcagaacaatctgcaaaaggactcgatttcacggtcaggcaagaccgtgagagtagagttttcagcatcctcatagccactgggatgcagcgtcaattctaagagtcagatgctcaaagctggaaactactaagaaggcatagtgttcgtggaagccaagcttaatcacggaacaatctacaatcacatttacaatgactgcttcccgtttcttcgagagctgaggagcatgggtgcaaggatggtttgtcttagggagaagctggaatgtaagcaccttctgggcagggaacttagctttgttcagatgtatctacacactaagcactagagcaggttctcaatttatgactgtcgacagaatgagtgaagggaggagagaagtaaacgggtcttcagtgagagatggaaaagctactataccgcactcactcagcaaacatgattacaggcaggagaccgtttttagacgaagttgtagatagagaaatgcagaagataccaacaagttcataagctcagcaaggagggggaaaaagatggtaaacatttgtgtatcaaagccgtatcagagagcacgtcatggagctttgaatggagtcacaacacggattaggaggggatagagatgaggaagccagccaggtcaccttcttccaggaggtctgagctttcaggatggagattttcacaaaacaggtgaaagcagagccttctgggatgtaaaaacagcaagaaaacataacacccagagggaagaaggcgggatgggtttaaagagtacgaaaccttgcccaggagtagcaggggctgctaaaagctgaaaattcacctttagaagtgaattttcttaaagagtgggatcttttatcttggaggagaggaggagcccttttttgaaaaaaaaaaattaagcgaagagttctgatcagctctgttacaaagcataagataaactggagtgaggcaaaactgaggcaggttcaaagaaccacctggcaggacttagggtgcaaaatgcagggagaaccagggggctcgggagtgagtgagcagaagcaggaagacgcagcctccactgcacccctgggcttccgcggaggctcagacggcaaagagtcgacccgcaatgcaagagacccaggtttgatccccgggtcgggaagatccgctggcgaaggaaacgtcaactcactccagtcttcttgcctggagggttccagggacagaggagcctgacgggctacagtccgcggggtcacacagagtcagacacgcctgagtgactcacactgggaggccgagagaacagcggtcacacgaagagaggttcgctgagcccaagggaggcgctggagggaccacgaggaattaggtcctgatttaaatgttctgaccgcaagtgaaacgggagctgccgccaggaaatcaggcggaaaggttcctggggaaacggcgcagagcagagctggggctctcagtgcccgtcggagaagcagctgcctgcggcgacgttcaagctgccggtcgggggtcactcgccagagtcaagaaaagggagagacagactgcctggtggacagacagaggtgtgtcaaggcgagcggcattaaaggaccttccaaaccgcttactcaacaccttcccccgaacacaaagcacgttcctaaaactcgtttctgacttgagatgaaacacctctccccctcattcacaataaaggcgagagctgcagtccttcacaaccgaagctcaggctaagccccactgctggcatttcgtttgagagagagcgcgagggaccgagggaaacacaactcagggcttggacagctctcctttcacaggcttcattcccgcttcagtccgcaggagaagggaacgcagggcttcgagggcacttctgttattcggtagaaggcaatggaaacaaacagtctaactcattcactctgcagcagcccaggcactaaccgagagagaggcgagcgctgtgtgggaagcgcgtttctttcctcctcccacggccgacccgcgtctctcttccccagctcatcaggaacccgtttcaaacgccccgaggacgctgataaggctctcgacatcggccaactcctccaccacggaagatcgaggcggcgcaagaccgagcctctccaccttcgcgtggaacaaaagccgacttcagcgctcagcacccacagctgttttccacgaatacaaagagcccagccagcccagccggctctttgaaggtacgccatgcttttcctgtggcctacttgagctgcaggctgaaaagtgcaaaaaaagcaaaaaaaaaaaaagaaaggataagttttcacaagagctacttggtgagacgaagctggttctctcccagtgtcaactgcgtgggggcacgtttgctggtgtccattcttctttatttgttgaaagaatcactgagttgttccccaaatgtattattattttgactgggcagatggaagttagtggttacaaaaagaaaattctacatttttcaaaaagtcatcatttttcttatcagagactcacaacacggtgttgatggaaagttacctggcagggcgggcactgtcccatggggcgtgaggctcttgggcaggtcagcctgagcttggaagctggtgcccatcgagggtcggcagactcacggccgtgccctgggcaccgttcacagagagtgagacacacagggcctcgaccctctcggcgggcggggggggggggtcccctgggggctcagaaggtacagggcctcgaccctctcggcagggggaggcggtcccctgggggctcagaaggtaaagaacctgcctgcagtgcagaagacctgggttcgatccctgggtcaggaagatcccaggaggaggaaatggcccactgcaggaatcttatctggggaacccatgcacagagaggcctggcgggctacagtccaggaggtcgcagagccggacaccactgagcaatttaaatcaatacctatccccacccccccagtaaggctgcacagaagggcagtttcaacagcacaaagacagcaaacagccctagaactcagtccatatgggaccatttctgtcccaccaacaaggtcccgggctactcacgactgttcttttttcccctcaatgaaacaaacaaaactgctgtgagcatgcttcattcagatacgtcccttcctcgtgtaggaaaggtaggagagagccttgctgagacagacacagagtctagctcctgtctcttcgtcctattcttagtctcctaaacaaagcagtgaatttgtgtgagagaagaatcccgtgggaaagaagctcaattacagtccaagaagcctaggagccactttaaagcagagctgagctcacgagagccgggcaccaggagttcgcgagctgacttcgtccagagggagggagacgcaggcttggacgagaccgcgagagactgcgtggaagaaaggtggttctcagtctggagggtgatgttttagcagaaagacacagaaacctacaaagcagtgcatctggttttcagaaaaatgctggaagacttggcacaaaactgaaggaaaaaacgatgtccaatccttaaaaagatggacgtgcccagggtcattactacgcatgtcggtttgctgggaccaccccagtttaccttgacgtccaagagtaataattcctgataccttctgtaattctcacaagtaccccagcttggacaacaaattttatggtcttcctagatatgaaagaatggcaatctaagaggttaatgtgagcactgaaacagaataacacagttctagaaaattctagatagctcagtgtatccaataagtaacgcagcctccctctactgcacttacatacagcattctgggttggggggtgcggtctgatgataaagaggggggctcacacacagaagaaggcatgacgcgtggccctcaggcactcaggacgggcagcagacacaatggtctttgaaggaagacacagccgtttccccagggcctcaaatggatggttcttcagccacaggacatgccactgaaggctggcttaaaagttctcggtgattctgtgagtgaaacaggtgtgtgcaggtagggactgttagaaaggtgcctgctgccggagtctccaccgagggagacataccctcacagcgcacgtgcacacacacacactcactcacacacacactcacacacacacactcattcactcacacacacactttcacacactcacacacactctcacacacactcacacacacaccaccacacacacattcactcacacacacactttcacacactcacacacacacactcacacgcacacacacacatcacacacacagtcacacacacacacactcactacacaccctcacacacacttactcacacacacattcactcacacactttcacacacacacacattcacacacacactttcacacagtcacacactcgcacacacacactcacgcacacacacactcacacacacttacacacactcactcacacacacagtcacacacacacacacacactctcacgcacacactcacacgcacacacactcacatcacatacacagtcacacacacacactcactcacacacacagtcacacacacactcacacacacttacacacacactcacactcacatcactcacacaagcaaagaggagccggcgcttgggcaagagccactcgggcctcgggcacctctgtcctgccgtgggtgacgagtgataccgagggcggctctcaccccacctggcggcctcgggagcttctccgtggctgggggcacgcgctgaggagagcgggctggcagaggaggacatggtcagacagcatcaccgactcagtggacgtgaacctgagcaaactccgggagccgggacagcggagcgggcgtgctgcggtccacggggcggaccgagcgctgaacagaaacagcagcaccccgatagggacgccccagagcgaagagcccgtgaacacgcgccgcgggcggcaggcgaccccggccgcccccagcgcggcccagccgggctccccgcggccgcccccagcgcggcccagccgggctccccgcggccgcccccagcgcggcccagccgggctccccgcggccgcccccagcgcggccctgcaggaggagccacggggttggcaggaagggaggtcgtctccggaaacctaagcgcttttctggagagcgctgcccggcatgagagcgctgcccggcatgagagcgctgcccggcatgagagcgctgcccggcatgagagcgctgcccggcatgaaagtgcgcttgagagggcctctgaaccactgagcgccgcacaccaagccactcaggccctgccttcagcagagctctacgtctctttttggggggctgagaggggagggtggggtgttgcccagaataacaattttcagcgaaggaaaccccaccacacgggctgacgccggcttctcccctctcctcccggctgggcacagtcttcaccaacagctcttcaggcgaaagcctcggcagggtcagagaagagagtgacggggagagaaacgcgcgtgtcgagctgcgcagctgtgcctgcgggtgaacggggcgctccgcgcagaggggacgggggcccaaaggggccgcggcgagccagagtgcagctctggcccgagctgttggggtgcgcacgtgcacgctggcacaggcctgggagaggcgaagacaagggcgcacggaagacgccgggcccctttttctccagcccccatacaacacaaaggaaaacggggttcaaccgcagcaaggccgccagaacagccctgcttcaaaactcacaggaaggttccaaaccgggaaacgctctcatagctcacgtcagcttacggcaacccttcctgaccaggctcctgaccttcgacaggaccagttacgaaacagttcaactttagcgctttttcaagacggagctgccggccgaccagaggccgtcacgtccatgcgttttaacagccaaaccccgcatctccatgccgcacgttaccgcctgtgatgctcggagctggcacagccaccgcctgtcattcttaaaatgcgaagagaataattcagcgccttttctgtgatcacagagaatgcaattaatctgcaggctgccttggtatgtagaccaaaccttctgcacactgtttggtggggctgcagtctagggcacctcagccaatcttttcattccaacagaaaccgtgccaggctccttggcgctgggcagaggagacaaggtgggagggtggctgggctcccgcgggggcctgggttccagagcgatgcccgaccaaattcaaagctacctcgggatcagagggcttttgtctccgcacctattaaaagcaattaaaatatcgtctttgaaaaggaaaggtggttaaattcttacagtgtttgtctatggcccagaaactttttaaactcataggaagtagagggtacagaaaacagtggttgactgtttagagaacaggagtgatttattaaagcttgtgatccatgtgggaaaacggctacctgagactctcaagatatgagaggagaaataattataaatcacagaaggtatggggaggaggagaacagagagcgccaagaaagacaattaagtgtgttttcagccgttacactgcaacacacgcgtgctggctgcagccgcaaggcaaccccgaccccacctctgtctcctctgaggccaaacaaatggtccaggctaaccatcatactgacactcgccgtgggtctcagggcccccgaggagacgagacaaaaggaagaacagcagtaaaaaccaaaccctacgctctcatggatccctcattaatacaaccccagctcattctctggccttcaaagcccacagaatcacaaaattttagacggaccctctaacctaactcccggtttgcagatgaagtaactgaagctcagagaagaatgtgactcgcccggagagcaggtgcggaggagcaggatacagccaagacccccggctctcggggccctggacaccgcgccgacctcaccgccaccctcctcctggcctggccctgatagcgcctctcttcttccccggaagtctgcctctccatcctcggtccctgttccccgtgtgacactgtggcacgatgaaagagaggcatttggccttgtctccagtcgcggcgggcttcccagtggctcagtgctaaggaatctgcctgccagcgcaggagagccggagacgtgtgctcagccccagggtggggaagactccctggaggaggagatggaccccaccccggtattctagcctggagaatcccacggacagaggggcctgggggctgcagtccacggggtctcacagagtcagacgcgactgagcgataccggccaccacaccgacctgttccaggcacagagctccgaaaatcctcgtcactccctgagaggggtaagagaagcacctgtgacgcgtgtggcctctccccagcgcctgagccttgggatctccagtgaggagtgtcctttgtgtgctaaggagatgcctgggggctggggaatcccttcagggtggaggctggtcaacccggaaggccaaggcatgcttgggggttgggactccagacctccgggggagcggggaggaaccgaggtggcgttgatcacccacggccggacacggctgacatcaggccatcctgcctacacaatgaagtggcagtaaagcccctccactatggggttctgagagtttccaggtcagcgaggatcctggggtgctggcaggtggcacaaccagagtgggcacggaggtccacgcccctcctccacatcctggtccccacacggctcttccgagctgtaccctttagaaccatcgacagtggcagcagcacatccctgagtcctgtgaaccacgctaacagatcagcagcatgagcaagcagctccaagagcccttcagtggcccaggcttccagctggagtccacagtgccggcagtcctgagagacggggcccttaatgtgcggggagctgattcgaactccagggagtcagcgtccgaactgagctgaagtgtaggacacccagctgacgtccaggaattgggggaactgcttgttggtgtcaggaaaatcccacacgtttgtcctaggaagtgttgggagtaaaacaactcagatgtgaattcctgcatctcagccctcaccacttcagcccagcgtcctgctctgccctccaccccacggacatctgtccttccatcccatgaatgaccccgctcaatctcagacctccctgacaggtgaaagcctccaattctgcttcttgctaccaggagtcggacacgacagtcgctgacttccagcagaaggaagggtccccccgtcatgactccatggcctgaccctcccctgcccttgacctgatggatacaaacattccacatgagtccattctttccactgaacaccagctacgctctctgattaaagcgtcatgtcgggctgtaggacatggctgagtccatttacagacacagacttagttactttaaataggacctcattccactatcttgacatggtagatatttccaggggtaattttcaggttatttcttacaggcagtgaactgtaagtcaaaagtctgaaattatacatgtaagtgaaattatccttaaaaaatatttaactataaagtaagtgtggccaggcctttcctaccttggtggaccaacaatgggatcaaccagaacctggctttaacccactgggtgaagttacacagcatgacacaaacctgtccacactgcacgccatctgggagaaggaaaggtctttctgccctcctctctgctgctactgctaagtcacttcagtcgtgtccgactctgtgcgaccccatagacggcagcccaccaggctcccccatccctgggattctccaggcaagaacactggagtgggttgccattgccttctccagccctcctctataatgatatccaaatacaggaatcaaaagagggccacactatgtgataaatggttagcagtctagacccatgcatccagtaaaaataaaacatgggccctggatgtcattttcaatttattagtagccacactgaatatatttattccaaccaacatatccaaaatattatcatttcaacacacaattgacagaaaagtgactaatgactagcttgcactcatcttttcctactgagtctttgaaacctagtgtgtagtttatagtccagttgcatcgatccctgggttgggaagatcccctggagaagggaacggctagcccctccaatattctggcctggagaattccgtgggccgtatagtccatcgggtcgcaaagggtcggacacaactgagtgcctttcactgtcactttttttcacagggcccggagccactgtgcctggaggcgcacgccggacagtgcaggacagatttcagactcaggtccacacgttgctggcacacgtgagcctctgatcagtgctgagcacactgccttgcagtgagttgacctgtgggatgccaggtgctgagaggcggactgggatcagaggggcagtaaaaggcctgaaaagcctgagcagactccagggggcagagacggtcagggaggcctggcatgctgcaggtcatggggtcacaaagaatgggcacaactcagcagctgaaaacagcaacgaaagccgtcagtccgtgccgaactgtccctgctctcacagcacgggagccctggtctgctcaggagcaaaggccagcgaggtctccacggcgctctgagcccttcctccaaggcatcctgaatcgccgcactgcgggcctggcctctgaagcggctgctgcgaagcgcccaggagaggctgaaaacagacgagcacgtaccgcggggtcctgcatccctgcgaaaccatctgcattctgctgagcagatctgcgtaaggttggagccaaggggacttggctggtctccaggctgcgccctccctctgggctgcgacagccaccactgtcggtcccgttaggagggcgggagagcaagagagaccctccaatcagaatcagcagcgcaacggagccctcccacactgacgtgaaaatcgaggtctcccggggtaaacgtggaggagctctgagatgtgacctgaccgccacctccttcgttatgacaagagtttactttccacgactcggacctgtggcctgtgtttaccgccccgcgcggggctgcacccacccaggcagacacacgcgcacctgaacgccgtgggcccccagggaaaccaaactcacgccccgcttccttccagaaagccacaggctgctgccccgggggcaacgctggcagcccgagtgcgaagcgcgctcgaggtaacggggcctcgggggcgcgccccgctccttgtctcttcctccgggaccgaggggtccgactgcagatggcgagtgaacaacgtaagtgacaccgccgggcaggcaagtgtcacggggaaagcacgcagaaaactgttcgactctatttaacatctttgttattttatttcagctgcctatctctttctaggacgatttcccagggaaattcccttttcgttacaaaagcggtttctcgcgccagggaaaagactggcgcggtgattagggccctggtgcttcagtagcggtcatctcagatggtgcgtctgcgggagaccagtggtttcctaaacaggcttctccgcatcctgccgcgggttcggtttgccccgagtcatctcttctggggcctcgagagaagcagctttcgggagaccgcggaaggaggggagaggtcgtgaagagcgcctacgcccagctcaccgacaggacggccgggacaggcgcgatcacgccggcccggagcgcgcaccccaggaacctctgcttcgagtcgagcacagccgcgcgccgcgtcggcaactgtccgtgctaccagtgagacagctggcatttaccgggcacccagtctgtgctggccccagagtgttcagtgatggtcaaatggcatccaaagtcctcaactccaacgaatctcgccgattctacgttttcggggcgggggggacgctgcatgcgtggcaggtgggatctgagctccccaaccacgggtcaaccctgcagtggaagcgtggagtcttagcccttgggccaccaggaagtctctgattctgcctttgaaagccgactctggttgtcccatctcagtgggaagatgggacaggcatgcaggcgctggtgtccggctgcaccccaagaaggacccctgctccatcgccccctccccccaacacacacatacacaccaccatcctgctagaaaccttcaccatatctccactgcaggaaaaatcaaatctgaattccctgcagagacagacagggccttgatgagttagcctcactgtgccctcagcttcatctccttccttcaccccataacccccacatgccggtcaggctgacccctgcaccactgtcaagctcgtcagacccttcttggactccgttaatgcatacatgggacaagcgcctactcatcattcaagacccaggccaaacggctcatcctctgagaagccaccttaacgttccaggaaaaaactcactggactgtcacgtgtatttgtgtgtctgtcttccctggagactgccctccatgaggccagagaccacgtccagacccctagcaggcacagagaatgtgaaatgaacaaaggaccacacttcactgcaggatggtctcagactgagggcttcccgggtggtgctggcggtaaagaatccacctgccagactcaagaaacacgggttcagtctctgggcagggaagatccacgggaggaggaaatggcaacccacttcagtattcttgtctggagaatcccacgaacagaggagcctggtgggctgcagtccacggggtcacagagattcagacacgcacgcatttcagattgaagtcaggagtcagatgctcagagttcaggctttgactataaagcagctcctcacacgagctactgtgtgtcacgcggctcttccaaatacgccagcgatgtaatgtgtgcacggagaggaagactgagacgcagcgagacagcagaaacgccctcagaagtcacaacagtcacagccacttgggtcgagttcctactaattctccactcaacaaggcaggagaagaaaaagtacagcaggtaaataaagtcactgaaggtctgtcggtctctttaaattctttttacactattactgctttccttcctctgtttcactctctggaatgaatcatttcacttaagccgatttttcagatgactgaagcctaaacttaaaaataaataaataacaattcagaatggagatacttctgaaacttattacccactttccctgaactcttcaactcttcctatggaaacgaagcctgagttgatgagtcagcagcatcctcaggagtaaggaagaccgccccgctcacagcccactgataacctcaggcgcgccgagatcttcattactgcctgctccacacagaggagcctcacacggccgtggtctttattccctgggctaatcttaatagcatttttatcttgttccttgcaatcaagactcttagaaataatttttcaataatttgctggcctcctctgccaactcagtgctaattaactatattcacggtttctactggctggggaaaaagtgataactaaccttgagagaagatgtattttttttttaattgggtggaaaattattcaaccttaaaaacaagtgaaattcccggccatgctgcaaccttgaaaacattacattaagcaagataaactagacacagaagggcagtgtcgtatgattccacctgcccgagagacctagggtggtcaagttcacagggacagaacctaagacggtggctccctgtgcctagcaggaggagggcgttcagggtgacgaaagttctgggcatgaacgacggtacagctcgaaattgtttttattgtaacgaaggttgtgattcatatagtgctgactgtgtattgggcgctactctaggggctttgcaagtattcacttgttaattgtcacgactgcccctagaggtaaatacgatttatatctccctagcccaccaggctcctccctccatggaattctccaggcaagaaaactggagtgggttgccattcctttctccagggaatctttcccacacaggaatcgaactcaggtctcctgcgctgtggacagattcttcaccatctgagccaccagggaggccccagatgacggtgtgaacgtgctcactagagcattgaactgtgcacagaaatgactacaatggtgcattttagtcacgtatggtttatcactagatacacacacgtacagatatgtaacgtgtatatgtattttgaagcaaacctcttaagaaagatggcatgcttttacgagtgaagggtatgacctttaagccggcacgtgggctttgtgacttccctctgcaaggcaggggttgaaattacttcctcgttcctagtcggcctgaggatcatgagaatcgcccagaggactctgaaggtgtgggcggtgtctgcagtccccaaggcctttcgctcatgagcagcacactgtgacaaaggggtgctccccgggccccggggacaccctggacaatcccgggagagctggcgcggagaccgggaagcccgtcttggacacaggctccaggccctcctctcatcctgaggcccagccagacagccctggggtcacatgcttggtcacgaagagaacgaagatcccaaatatctggagtcactgggattttgagggtttgtaaaagaacagaggtaccttttaaatatcctactgttgggttatagcttataaatgaaacattttaggttagattggaacaatattttgaaagcagcctggtccataagagagagagggtgtatctggtcgtgtgttcagtttggcaaacacacctcccagggcttgtggggtttgatgttgaattcggtctcgcttaatgaaaggttactattgtccctctgcctgaatgataattcaccttccttttttgcttccttatgaaatatcatgaaggtctactctaaaagttataatgtgctgtgcctgggaaaaatgtttgaaatttttaaattcatatatgctttattaagcaaacctcttaaaacagttctttttttcccccttgaatatgagttatttcactctgcacatgaacctaaaattaaatattccatctctatgtgtttaataacatcaagagatataacaattaatgagattgccgtgggggtggggtggggaagagttgcataaggagcctagtaagagtttcctatcttgtcagaatttggtgttttagtttcttttaagaaaatagtttcctggcccatgcagacactccctgagccctgagatcaacacagcatcctgttcgaatgttatgctggaaacactgtgctgttctaggccaaatgtatccagatcacaccgaggaggacggaaagaactctctcttgatgcaccacggttgctgaaggtgggtttgtttatgagtagaataaaatttacagctaaatataaaaacagatacatcgtcatcttgtaaagggtagtaacatgtcattccaactctggactcttggaaaaaacatgaaggtcatgcctaaaataagaacagtgcagggccgaggatcaaaccaggggtaaaaccgcagacttgtccctgttttgatgaaggcattaggcaggttacaattggacagtgagatcatttctcttaaaccaggaaagcactgtgggtttgttattccaacacacacacacacatacacatacacacacacacacacacacacacacacacacacacacaccccactggccctggggagggtttctgaatcaggtgtctggtctgggtatgaaacagtgattactacgtatttttcaaaggctatttatacagactattggagccaaagaggagagaggcagaagaacactttgctccgctgtgcgcctctcccttttcaactataaaagaactttaaaagtccacagagtgaaagatttcacctcctagttactaagataaagatggctaactggcttcctaaaaagatgcaaagaaaccaaaaagtcacatgcatcaaattgttatttttcatagatttctgtttttagattttaaaaagtttctcgagtttcagaggctatcaatgaccacttggatggcctaaaaaaggatctggttttgcctcttactaggcagtgactcgattttgcagaacctctgtttcctcatccataattctacttcctaccctcacaggggaggttactggggttaaataatcttctatccataaatgtgttaaactcagtctggcacatgtggacatccaattaatattagtttccttccttcctcctgactcccagtgactgaggccagtgaccaacgtgggggaatggacgagggtgtggcagggtcggcaggggtaacggggagagcgctccaggcactgagccaaaaccagcaggtccggggttccgtggtggtgcagcggttagggacccgctttccaatgaagggggtgtgggtctgagtcctggctgggaaactgagatcccacatgccatgtgacatggccaaaaaataaaaataaatttagaagacagcaggtcttttcaatcctgtattgatcatggacacccattttgaactcacatgcaggctgtattatataatatatatatatagagagagagatatgttcactaagatagaacaccatgttctcagctgttcagttttaaacaggcattcaggataaagaagatgtggtacatatataaatggaatatcactcagccattaaaatagtgaaaacatgtcatttgccacgacatggatggacctagagactgccataactgagtggagtaagtcagacagagaaggagagagagcgcagacccccctatgtgcacagtgtaagaagagacatacagatggactgactgacaacacagaaacaggctcacaggcacagggaatgaactcatgggtgccaggagggaaggacggatggaagaggtaagtagggagcccggcctcgacatgggcacactgctgtgtgtaaactgggtcaccaacaaggacctgcgcaaagcacagggacctctgctcgtgctgtgtggcagcctggatgggaggggagtttgggggacagtgaacacatgttcatatggctgagtccctttgccgtccgcctgaaaccatcacaacattgttaactggctatacttcaacataaaaaaattttaaaactggaaaaccactcctcctcctctgggtaaaaaacactactactggaaaaactcagaaatgaacacaagacattaaattcccccatcagtactcctctacctgacccccctgtttttgcttttctgtagcccagggacagaggagcctgtgggcaccgtctatgggatcacacagagtcggacacgactgacatgacttagcagcagcagcagcagcctcaatatcatactgtcaaccatttgcctgtttgctgtcctgccttccccacaatgctggattcacagaggaatgagagacagtccctggctgtcgtgatttctgttacagatccagcactcttacaattattcgttgaataaacaaagttgaactgaagtataatccacatgccccttaggaactcagaaaattctactgatcaaagcaccatcattgtttcagttcaaaaaacccttcattcaccaaatttatgttggttctctaaagacaggagggtgatcttaaatgctagttaggtgccagccggcagcaatcattttcattcatacagtcccacttgcctcctgctgaaaggggctatcttccagaaccctcacatggagttttagcaaattctcacattcactgcgttaccaacccctgagaaggtgtttcaaggtcaagtgcaccagctcaagagcatcctgtggcaagcatgagatgtccctctgccgttaacacaaaacacatctcaaaataacctgaaatgtcgagaccacattttaattttcccgaaagtgcttgagataaagagcagtagaggatactattttccaaaactggatgcactcgtttaggttcctattaaggaatccagtgtccttatgagaacagactccgagaagcagctcagagagaagtacctcctgggctctgagtcgcactgaactcccgcttctctgggcttaccgggcctcctgtagctttgtgagtcaacattttctcttcatgtgtgaataaacaaataataaaaagggtgtgggagggaaaggcaaagagaagtgggaacataaccccgcgctgcctagagttctgtgaagatgaaatgggccaacagatgcaaagctcctttgcaaactttaaaatacaccatcgaggcgagaggccacggtcgtgatgttttcccctggaaacacaactctgcgaaacctgcctttcctaactgaattctttcctcaaatacacctttagtaaccgattgttaatgaagaattaccgcattctaacaaaaggattcacgatttttgtgaaatctaacaaaaaagtttcaatacggcagtgttaatttaagagaatgggaaatttaaaaactactcgtatagaaccagaacattgaccatattcttttcaaagcgactagaggaaaaagaccaccagaactgaagaagacacgagtgatgctttggagcattcagacaatcacacatctttctacaagtctctccactccagcgcagtcgtggctcccagcgagcggttccttgcggccctcactgcacgtcagtccgtcggttcccagggtctgcagggctcctgggcccgcctccaccggtcagtaacaccaccggcctcatcagctgagtggagccagagtagtttttctagaatgaagccctcatggaggtacgctccagcctcacctgcttttttggcggtggggcagcgggaagtcctggttccgtgagcagcgacgggaccctcaccccctgcctgtgctgcctcacgccagccgggaccccctgtcccgccccccacgcgccctcctgcctctgccctctgtgcccgggctctgcctgctggaggcactctgcccctcagcccagcctccgaagcgcctgtcctgggaggacctgccgcctctgataaatgccccgacgggggtgtacgccttcatccccagcgccccgcctgtgctcctgcagctgctgtccaatgaactccaccccctagactccagctcccaccgctccaagctggcctacagcgtgcagtcaactcaaaaaaaacagtgggataaagggataacccatttcttgccctgtctgcttcaactgtaggctcacacacgcactcttttactggagagcacagaggtgcaagggggcccattctaacacgaatgaggacgtctgtttcaacttcatgatgagccaaacaggtagagacgcttgaaggaagagtcaagtgtctcaacttgtacaaaatttccccaaagtctccacatttgcaaaccacgaatttactcattggccatgcccttccaatagtccctacaaaaggtattttcaaattccatttgacatgtactttcatcagttaatttttaattgagccaaatattaaatgctcacattaaccagacaaagcgtcttgagctgctgatttgcggtgacagcttgtgttatcctcacacacaggccaagcatgaaatagaaaactaataaccccgtaagtgtattctccaagtgtcgcttatgggaaagaaaactacattcaaaggaaacttgtgcagtgggtgtcatttcccccccgagctgcaagctgttacgatgaagggaagctcacttcccacggagccggaggagcgcagaccccaccgtcaccgcacggactcattaagaggcaatctggcagcagctgaggggacagacactctggagaaccggccaattatctgggtgtcctttgtcatctgaagttcctgaactcacccacagataagcctgtgaagagggcctggcagtggggacataaagcacagagatgagaggggagaaggggagatggggggagcatttgcctgtggttttattcatggggacaggtctgtaagctgacacatccctcttttgcaaaggcccctggagaagtacggtcaagcttcattacaagtaaacaaatcacacgctctttctccaacagatgacaaatgatgagcaacgatgcttttgagtctgcttcatgccaaggaatgaggattctcaacatgcaaattccaccagttcttagaaaccacagacaggctgtgatgtctgcttcagccatacagagagctgagccccaggctgccaggccagtgggctgctccctgccaccctcggcggtcttcctggggaagtggaatcccgggtgctctctcccctgggagccttgagctgcactgactcccaccttccgctggctgcttgttttcaggggagaagaactaggggaccacttgcccttgtgacttttatgctatgtttctttcatacttgtgctacagcgttgataagaaaggagaaaccactttgtccccaccgtgagaaccacgcaggagtcctctttcttaaatggtaagaaaatgaaaataatcctagacgtcaagcctgtctgaactggctctgagacacaggacagcagaactgagagcagctgtgcacacgcttccctggggcgcagacggtaaagaacccgcctgccgtgcaggagacccgggttcgatccctgggtcgggaagaccccctggagaagggcatggcaacccactccagtcttcttgcctggagagtccccaaggacagagcagcctggcgggctaccgtccacggggtcacagagagtcggacacgactgagcgacgtacacgtgcgcaggtgtgcaggtcatgcgcatgtacttttgcataaacagatgcgaggaggcggctgaagggctagtctctaatactagcatcaaggacttttatgcaagttgaatgtttaatataaagcaaaatctagaagacttcttttcagggatgaatgacatactttttcaattcaatgacgggtgagattaaaacacttaggtgtttttcttcattcactgctactaaacctcagcagatcagtgggcgggacctttgggacgcatctctttgctgttgttcagtggctaagtcgtgcccgactctgtgacaccatagactgccgcgcgctaggctcccgtccttcaccatcgcctggagtttgctcgaattcacgtccatcgagtcggtgacggcgtccaaccgtctcgtcctctgccacctccttcccctcctgccttcagtctttcccagaatccgggtctctctcagtgagttggctcctctcgtcaggtgaccaaagcactggcgcttcagtgtcagaaccaaggggcacatacatccctctaatgggacaccatggagtggggcgcacgtgcttaggtaacaggcggacagcaggcgtgagggtgggtttgatgtccgaagcccctcgatcccactcccctgctggtccagtggatgagaacccgacagccagggcgggggcactgcttccatccctggtccaggaagaccccagaggccgcggagcagctgagcctgtgtgccaactactgccgagcctgtgctccggagcctgggcaccacacaacgggaggcggctgccatgagaagccccaacaccaccgcaaaaagcagcccgttcgatgccatgagagaaaagcctgcacgaggcaatacagacccaacggacccaaaaataaactaaataaaaattacattaaaaagctgcctctgtcacagtccacttactcaacaacagtcactgtgtgcacctattatctgctatgctgggtgcagcttaaacgtgacaggaggactatttcttttctcgtttcttccggcaggggagctgtggtgtgagccatgtggggtcttagttccccaaccagggactgaatctacgcgccctgcagtggaagctcagagtctcaacccctagaccaccaggcaagtcccagaaccgtttcatgaagtgagaaagtgccagtgcaggagaacaccttgactgtgtaagatccctacagagcggggacgctacagggatgttggagtaacactaacctcactcaaagcgagtcatcttttcagcaggcaaaccggcagtggcgagacaagctctggagagtaaaacttcgaggtaaacacctccattcaatcggtaggcgcctacagaggactttggcgggaaggtggtgtggaagcagcagtaataaaagaaggcagagccggcgggggaagccaggaccacgctgcgaagcgaagaagggaaacgggcgatcgacagggactgggaaaaggcgccgcggactccagcctcagcgtctccctcaagctccagacccttacgaccggctgccatggggcattcccacctgggcatcctactggcagggagcagggggactcccaggtggctcggtgataaagaatccgcctgcggtgcaggagacacaggctcaacccctgtgtcgggaagaccccctggaagagggaatggccacccactccagtgttcttgctggggaatcccatggacagagggacctgcgggctgtagtccacggggtcacagagagccggacatgactgaccgacgacgattctactaggagctcaagttgaaactgtccagaattaattccatcacatttatcccaccaaacagtcacgctgctcatccttcctcgctctcttcaggaccacatccttctgggaaacagcctgggtttggcttcgcctccgcttcctcccctgcccccctcctcacatttggtccgttcagtcctctgggtccccgctcccccgccgccgtgaatcgggcctcccacctggctcccagtgtccagcctcagccactgtcatcctcctcaagcccacacatcccgccttgactcagaacgctttcaataatccttttaacatctaccaagttaaacacaaactcaggaccagtcttacctcaccagggctctctacgccccaggccagtcagactcttctccaccccccgtgacgccgcaagcatccccacctgtcccgtctcctccagctcagctgctcggcctgtcctccccactatctcctacccaccgtctcctgcacgcaactcagccaggtcccctgccgtccactgaagtgtgtcaaggatcacagcaatttacacagcacttatcttagtctctctactggtcagagttccttagatgcaaaggttatcttccacgtttttcactcaagtgaaacacccagcatagagttttgcacatagtaagccctcaataaatttttttcaatggaaataggcagtgtccctgccctacacaatagcagggtctttaaaacccttccgttcccatcactgcccgttgctaggaactcctcacggttacaatttgcaaacaattgctcattttccttgattaagacttcttcacatcatttttcttctaatgttgtcacttaaatagtaagagactctgcattattatatttacaattttgttagaaaatagcttcaaaccaccagtaaaagttttcagtgttaaaaagagagaggtcaagaaagacactcctggcaggaattcataaagaaaatgggaggagacagtcctgaaatgcagacttagaggtgtcagcaaacaccctttatagacctttttcctcaagagataaaataccagtatctaaatatgatgacataattttattcctatgctaattgtaaggaggcactgacctaaggggactaagcacttatcccatatacgcttcgaaaaatcctgagggacagcccgcaggtccctctgtccatgggattctccagcaagaacagtggaatgggtggccattccctcttccagggggtcttcccgacacagggatcgaacctctgtctcctgcactgcaggcggattctttatcaccgagccacctgggagtccccctgctccccgccagtaggatgcccaggtgggaatacataggtatgacattcattgtgcttaaagcagaagaagtctgaggattggtgaagacttgggaaaagtcaaggaaaggcaacctgcaatgctgatgcctggtccggcctccaagcgctagaagtcagaaactctccacattcttttgcagcttaagagaaggcagtttaaaaatccagaaatacagtaattgggactgtcacaataaagacgtattgttctcaatggtaaaaatctccctggaaaacttaagcttcacttgacacagtggttccttggattggtttcaggagaaatttcagcttcacttgataccacagatccttgagtcggtttaggacccaggaatagaggggtgagggggttggtcataagctgactcgttatgctgaagctccagagcacagatgagctgattattaactgaaaatggaatgtggctcaatctctgaaattctgaaaggcaaaacaaggagcagaatggaagtatcagggaactttctcacagaacctggtccattgcctgagaaaatcagccaagtagcccttagtgtgtctgtaactgctaccaatggccacgccagcatggcagggagattccctttctaacatgcttaagacggtgtttggggaagtagtcttcagtataagctattttagctgcgttgagttagtgaaacttcatctcaggctagagtatcagccccactgtagtctcccgctgcagagatcagagccagtggactcctccagcagatcctatctttttctggcacagggttggagtttatggtctctggagggaaagccaccatatctgatcacagaatttgtccttgcctggctgcttgtggcgagaatgcagatgggttcagatattccagcctggacagacccctctcctgcccctctcccttgcgatccagacacggtgctctttccttcaggtgagcccacccttcaagcgctagaggctcacaaggagccgaccttgcggcccctgtgctgggatgatgggcaggtaggggtcagtgatggaggctggaggggcaggtcctgaggagaaagcccacatggctctggagagagagaaacaaacacccgccatcaagctcacggatgtatcttttgtctggcaaataaagagcagagaaatcaagttggcactacagaatcgagcagatcagaacaagcagcaatctacaaaagtacttttagaaacgaaaatggctttgtcgtgatttcgaaagttttacaaccttcattaagaaagaggaccacgaataaaagacgttagatggtaaacacctgctcttcaggagcacgaatgtcacggtggactaggaatttctgtatgtagagttttggaagagaagcctcttaacaaacagaaacaggactagaacctaaagccaagccggaacaaaagcttttattttcatctctacccgttttggttcagatcgactctgacttttctgcataccagaatgacttaagaaagatagttcttcaaattaatctattctaaccatcttcatcagagcttgactgtctcttactgaaaaagaattaatgaaatcctttaaaaactgcagaccagtatttattaagtcttcataatatgtatagacagcgcctaatgggtaaatacttaacaaggaaactccccttgcctttcagttctcttaagcacatgtctgtgtaacacagtattttttaaaattatctatattcctctcctagttaaatcaggcctaatgcacacatgaatagccatatggttagaaataactttttcagacaaatactgaagtgtatgcaaaataacacatacttagcttttttttctcccctctaaatctgagaatttagaatcgcctcattggcctgggtggcaacagaattcacaacatctcctgcaacggcatccagggcagagaaaacgccctcctccctgaaccccgacctaacccaggaccgggcacagaggggactcagcctgacctgacccaggaccgggcacagagggcactcagcctgacctgacccaggaccgggcacagagggcactcagcctgacctgacccaggaccgggcacagacgggacgcgcggtcaggtctgctgaacagccatccccatcctcggctaactttcattctcaatcctgtttcaacctcacgcactcacttggtttgaatcaaaccaagagggatgaaagaagagccccgtgctggactcacttctccaagtggtcccctgtatgaagtggggaagggggaccagcgtgcgaggttaccgccatacctgagtcaggcgctattagatgactttaaaaaggtttaacagaacctttgaacctcaaacacaatatatctctgggagtaagaaaacctttttactcgcacactacaaaggcagtgttgtttttccagcacaaatgctgcacgactgctgaaatactgctcctgcgaagacacgacggatgacctcagaaatgggtgtgggggtgtgctgagtgggagagactgctattagtacacacagcacccacacacctgcttcatgagtgggtttatcagcctccaaaatgctgactaggactgggaggaaagataaactataagagtttggcttaaaaaaaaaatgtggctttctgttacctggtgtactatgtggcctaatgacatttagcgactgaaatgtaccagttcaaccaaggattgctaaaaagatcaatccgttctcactagaaagcacagctgaaagtaacaggatgcacagaagaaagccatgttttcgactgacattaaacagcaacaacggccctaaaacagaaaagagaactgagtgaactgtcaaattttacaaaagtccccaaatgtggttgctcaacagcacatgactgcagactctgggtgccatagtgtatcttttctctacaaagtaaatcactgagaaaggggtcatatgattcttcgcaggcagaaagatgcactttcccaaggaaagttcatcattaaatatattatttaagactggatcatcttcaggctatttttaatcctatcattttgctgccaaaattggccttaagcagctaatggtcaaccactagaaaacgatgttttctcatgtattttgtacactggcctgagaacggtcttgctttccagttaagcaactgtttgagtggatgtggactgtgtacagaaaagagaaactgcttgctgaccaactaataaaaaggaagctaagcctactggatgcggagaagtaagttcctgtcttcctaaaccacagagaccaaagcatgagcgcacagaaagggtcgccccactgtctcagcagaaggagccaatcgcccactaaagcaccttttccttgcagctttcagacgtctcccgctctcctaagacatgaagcaaaatgctgtcacgcttctcagttcagagcgcaccgttcaccatcaacttgcctacatctcaaccctgtgcttgcaaaagccaccttggccgtgaagtggtcccagggcccctaaactcatctacagaaatttgaactgagtgacaaggggataaagcaatgctgactacagccattaagagttaagtttcctgtctaactggaggggaaagctatctcactttaacggggccgccagtgccaactcgtctcgtgctcagctgcttcagtcatgtccagctctcttcaaccctacggacccgccaggactggagtgggtcgccatgccctcctccaggggctctctctgactcagggacggaaccctcgtctcctgcactgcaggcagattctttaccgctgagccaccgaggaaggcccgcagattgtagagttaccacgggaaacatccttgagaggtcagagcttgtgatcattctgctcctgtctctacagcattccagcctctctcctccaaagctcagaccgctctagcagatacctgggatgtgcctggcattctaggtaacaccacggagcccaggaggccactggaagggcacgctgcaggacccctcccggactctcatctttcctaaaagacgtcatgggaatcagtggtcggtgatggtagccggcacctctaacccccctgtgcaccccaacacctgcagatgtgcgacccacaggctctgactcagaggctctgggtgagacctgaggcgctgctcctccaagatgcccccaggggacgtccgcgagctcccacacgtggagaggcaggtctcagacgcttcctagaaccactgccgtctcgccgctctgctaccctgcctccctctggaagcgttattcagactcagggataaagccccaggccactccacagcccgtttcttcctcagtgtttgtgtgacgtgtggacttctgagaccgtctctcagacactgaccatccaaggccctgctttctgccgcttacggagcacggaatgcgaaccgttctccctcagcctcagaagcagcagcagcaaagaaccagtgcgacttcgagtctaaaggcccatcagaacaggtgcagcagatgggctgacccgctgagtcctgtgagcaggcaagttactgcccagcgctgagagaatgtgccagctctcctctgagacttgtccatcctcaccgggtccttcacgccgcaccatgacacgtattatgagagaagcaactctgactggtgcaaattgggaggaaaatctgtctggatgccaaatgctcaaaatgaaaatttaggttcataatgcatctttggaaaggacatgtaaatcagtctcccaaatacacttctcaaacaatactaccttttttattattccaaggtgtccatttatgatggcatttcctcacacttttttctgccaaaggcctttgtcttcctatttggtcatccatctctatgttgtcctgaatgctacacgtttcaccatcagcagtttgtgcttctatatgatttatttttactataagaggttttgtcaagaacaagtttatcatgctctatggcacgtcattgtggtttggcatcatagaatgtagcctctacatttaccaacctcagatacctgttgaccacaaagataggctctactaagaaaattctattttgaaaggaggaaagagcgggccttcacttaaaaagaaaattcagttgtatgagatgttaaggtaccacaactttacaacaaagatcaagataacatcttaatttctatcacaaacatatgtctccatttcccatctttttattgcattacttgacacatgacagttaccaccttggctttctttcaactggaaagaaaattttttttatattttttcacaaaagttatgtaatagtcaaactgttcagttacttttactttggtctcaaaatgatccttttggtgtctggaagtccctacctgtttggttatagtggttacaaacaaaaccacctacttaatcaaacatttaacaaaaatattccttacacctacagaactcttccagagttactaaagatctgataatatgggatctcaaagaaacaaacaattcacaaaaagcattgattaataaattttagggattaaatgcggattttcacttttaaacgctatacagtggcgtcagggctctgtcagctttggtcacgcagggtccggtgtccagtcagtcatctactttccttggacttttctcttttcagcccctcatacgtgcacgctttgtaaaatatgtaatgtgcttcttgaaatcgaacccacgtggagtgccttctaaggattttgctcctgttaggtcctataagatagaaacagcagtaatcctcctggagactgtaagaggaaccactgaatggcaccctttctcaaagacagctcctcagattaaaacaaaaagtctgcagaaaacttgaaccagagttattcctctttcactttttcacaaattaatcatttcagatatgaagtatagatgtcaatgacacttcttcagtcgtacgagctgtactcctcccccaaagaatcacgctcacaaaaagagctttatggtgacatgtcggaggctctgtctagcacaacagtaccaggaaaaaaaaaaaaaacagctcacagatgttcttcaaaaatacaagcatcaatcacttcaactaaagtcacagcatgagaatccacagctaagaatcaattcttctatctttatatagatactctggatgcaagtttgcccagcagaggatcccaccaaacgacgcgcattgtaggttagggtggaaaataaaatagactaacaattccaataaacttctaaatcatacacaagttatagaaatagaacacaaggtaggcggccaatgcgaaatctgtcagtggtgaaacaaacacccatagcccagggttcttcaagatacaaggtcatgcccactacgaacgtggcacaaattggaggtcagtgtcaccggactctggaggtcaacttgaccttttcacaaccatccaagttttctagggaaaggggctacactggttttcctctttggggagattttaccaagtgagtcagagaaggcaggcccctgggcctctagaggagtctgctcttctaaatcctgtggttttcaaactttaggacaaagcagaacccccccaggggagcttatttctgatgcagacagtcaggactcagcctggcatccagtttatgagttgtccctgaaatgctcgttttcaataagctactccaccaggtaccatgatcatggggatccctggactcccagtttcagaaaccttgaagggatgctctttatccccaaattctactgagcagcaaaggctggatctttggacctcagtggctggcgcaagggaagcaatgtctccggggaaggagtgatcgcggtagggctggcagggagagctctctgcaagggaagagaaagggagaccacacacctggctttactccgctggcccgcccttgaccctgggcccagccacaccccgccactcggactgcactgggacccgacccgaggcgtccggctcaggctcacacccagacgagcacctacccagcctccgttgtcctggatccaggtgtgcaggtgccggttcaggtactcggtcatccacagggcgatgctgtccaccagcggcgacatctcccggttgacgctctccacacacatgacccctccgaactcaaagaaggccacgatgcgcccccagttcaccccgtccctgaagagctcctccaccaccgtggcgaagcgtcccctcgcggtgaagggcgtcaggtgcagctggctggacatctcggcgaagtcgcggcggtagcgccgagagaagtcatcgccggcctggcgcagggtcaggtggaccacaggtggcaccgggctgggcgcaggcccggcggcggcggcggcggcggcggccgggggcggcggcggggaggtcctggagggcgcgggcgtgcggcccggctgggaggacaggatgcccggcgcgggggcggccccggcatcccactcgtagccccgctgcgacagcttgtagtggatgaacttgagcacgatctctcggttatcgtagcctgttccccccgcgtgcgccatccttccgccgcggaagggcagccgggcccccacagcacctctcgccccccgctgcccgccccacggccccgcaaatggggtgaagagttacaatccagctatttcattggatgtgctttgcattcctggatgagggggtgtcttcagtcacgcggaacacttgattccggtgtttccctcttggcaggagatgctggaaatttttatttaaatccctttcggatctttatttcatgaggcacattgctaattactgttcgtatcagtctacctcctccgtgatgctgaaaggttagaaaactaatcagtcaaaatcaggtgcgttcccctctgtacgctgcttgaaagcggggcacacactgcaagttacacgctgagaagactgtatcacactgcctggaaattaaacttactccaatgcactgaaagtgaaaatcgcaaaggctcccactgacagttacattaagccaatttcctgtgcgaagaacttacttgtattt

SEQ ID NO: 154 - DNA, 9273 bp, Hippotragus leucophaeus
  source 1..9273: mol_type = genomic DNA
ctttaccaactgagctatcagggaaacagaagagagagtattttggctcaggtataacggcctgaaggtttcccagagcctggatgagactatcttcaaaagcatggatttcctgaacagtctttcagcgactaacaccggccagagtgaggattctctggggagggactaacttgtctctttaccacttatagtctgcaggctacactgggccatccgaggtcgtgggtcttactaggctagctatacttccagggagtggccgcgggattgagtgcatccttcgttccagatgtgggaccctttgcagcgcattgactcaagaagactattttagctttaaatttggcttagtgcttacgcttggttactattcattacttgagacataacagcccacaaacgcagaacctcagggcattgaacccagggcggggagggcggggcacgcccagcgcgcatgcgcagcacctcaccaccggaagcagcgccggggcagggcatggcggcggcggcggcggcgacggcggccgagggtgtccccgcgatccaccgcgaggagccagttcgaggtatgcggagtggacggggatgaagtgtccggtggggaggcctgagtctccgggtacgggcccgagatgccggggctcacctggcgggagcgggcagatcggaggggcgcgcctgtgtgcgcgcgtgtttgtcctgtcagggcaactgagaaagagtggccccgaggtcaagtgtgggctgaggccggtgcaagggagcagaggcatgaggcagaggcgggtgaggcaggaacgaagcgagggactgggaattccggctctgagagtgcagcggacttgagggaatgaggtcaggtggaggggtgtgcggagaagctgccgggtctggattaggaccggggcagggcggggcacttactcattctccttcaattcagatgatgtcgctgtggagactgctgaggaagcaaaggagcctgctgaggctgacataaatgagctctgccgggacatgttctccaaaatggcaacttacctgactggggagctgacgggtgaggcgcggtccggatggatgcgggtagggccgggccccacccgctggagtggtttggcgtttggcaccggcagacccgtgaggtgctttagcagcgtcagtgtgcggctccctccctaaccccataaacctaaaaacatgcctgttggaagtttggggaggttaagaaagtgtaggaaagcagtccctccctcccctggagaaattcaggaactcctttcagaaacccaggataaacagccaggtcctactatgtagcacagagaactatatttaatgtcctatgataaaccataatggaaaagaatgtaaggaaaaaagaatatgtgtgtgtgtgtatatttatatatatgtatatatggctgagtcactttgctgtacagcagtaattacagcattgtaaatcaactgtacttcaaaaaaaaaaataaaagtttggtgcagaaacacgtaagaatacttaatacaaccctgcaggtctccatagggtagactgagcctgagaaaacgaaaacgaattcatcacgaagtgcttccttgggggaagtgtattttgaaaggggttgtaaagaatataagaattcagcggcggacaagtgggaaatgactagtgagtgagatggtataagcaagctgtttgtttggctaaagagatgtacttattaggttaaagggaaatggggagtgatcagcaaaatgtggggtctattaggttggtctgaggatttgatgacccactttttgagacatgattaattttttggtccggtgtgtatttcccagtgaagcatgacccatgtgtggaggaagatccaaaaaatgaagtccaggtcaagtgtagtttttcataagagtttgttatattgtttcacttccccaggaagttgctgtgagctaaatttgtgaaccagaatgtatgagaaaatgcttgatgtagaataggaggggttgtgagtctccaacagcctatttatttgtttgcttatttttgagcaagagaaaccaagcaacaaaatctaaattttattttagtttatttttggcttttctttaaaaattccaaagacttggcagtgttcccattcttgcaaggctctaattgaccagagttgggcattgtctccttaaaatggaccagcatggtgcagtttgtccccactattccctgttttctcccttttaccgagacctgatgtcagttgccatttattactcttcttatattgttttttagtagtggtacagaaatggttttctgtaccaatgtctatcaaaattgataaagtaatgatagactaagactaagaagatcatactgttccaagaaatgagagtgtatttctttgtaagtgaataatcttgtgtttaatatgcaaacacctggcttgcttcactcatttacataatattgctggctcctgggtatttgagtgtgtcactgttatttgaaagagacaagtctgatagcagtgagagtgtggatatggaggagagatggaataacatttcagatgaaaagatatggtctgtgacagagtgatgataaaaggagtggagagaggagcatggacccaagatcattacggaagtggaagacttgttgaagtggatattgacggatgggagcagctaaagacacatctgaggttttaagccaatggtgctgtcagccaaaataggcaagttggaaagaggaaccatgtttagtgtgaaaataatattttcagcttgggctttgctgattttaggtattactgggatactcgggtgactgttaccaagacattcaggtgacttgaatatgtgagtccagagctcagagtgatcagagcaggagaaacagatttgggagtcacctgcctagtagtgtgagtttaggacgtgtaggaagaggttgccaaggaagaccttagaggcagataagaagacctggactgaaatctcagggaatgcctgtattgggcaattagtttttattaacaggacttaaagtacctagatttacaaatgattattataaaattaatttaaagtggattataatttccctatgattgtcattcttatctatacagatacttttttgagtttgaaactcaaaaactctgggagtgccataggaatttgccacctatgtaaacatcagccatgagtcacagctgaggaggagctgagacctgatagttaagggggttggatgagaagagatctggcatagacactcaaaaagagcagttagattagaaaatgctatagcagccaaggaaaggagcagttcatggagagagggagagcagtaatgtcagatactatggagaggcccaggaggataataacttagaaaaggccaaggatttggtaattaggagagcactgacaaccttggagcatgtgatttctctgggtgttgggaacagagaccagacaggaacggtttataccagagagtggtggtgaggaggaagcagtgagtgtaagttactctttcaaaagggttaacagggaagctcctttgctttactgagcaaacaacgtaggtgtagaatagagggagtgcttttgggctggaggaaattggaatatagatagagaggaagatgccaggatggagagagaatttggaaaggcaagggaaaggagatggttgaagagaagctctgaagaggtagaaggattgggatcaggcacacaggagtagaaggagctgtgttggcaagaataggaacacttctgcctcttgagaatatattaaggtacagagaagtgtagaagtgaggcagaaagattgaggcagtttatgtaagtgggcttgactttcgggaaagttggagtaaaggccatttgctttgagtagggatggggaagggaaccaacaatgtgagaagcaggcaaatagtttggaagagtcagtgcctaaaatggaatacagaatcacaagtagtaaatgagttactaagaagcgttgaggtcctagttgactttatatatatttcgatatatatatgtatcttttccccatctcttctacatttatttgcaaagctgttttttttttcttattttattttcaattgatggtaattgctttactatattgtgttagcttctgccatacaacagtgtgaatcagctctattcatatgttctgtccctcttgaaccttcccctctcccctcacccccaggttgtcacagagcactgggttgaagttccctgggttatagcaacgtcccactagctatctgttttacgtatggtaatgtatatatctcagtgctgctctctcaatttgtcccacatctccttcccccatgggtccacaagtctgttttctgtgtctctattcctggcctacaaataggttcatcagtatgatttttctagattccatatgtatgtgttaataaacactatatgtttttctctttctgacttaacttcactctgtataacaggctctagattcatctatctcaataggactgactcaagctcattcctttttatggctgagtaatattccattatatatatatgtaccacaacttctttatcccttcatctgtcagtggacatctaagttgcttccatttcttggctattgtaaagagtgttgtaatgtacattagggtcagttcagttcagttcagttgctcagtcgtgtctgactctttgcagccccatgaattacagcacgccaggcctccctgtccatcaccaactcccagagttcaccgaaactcatgtccatcgagtcggtgatgccatccagccatctcatcctctgtcgtccccttctcctcctgcccccaatccctcccagcatcagggtcttttcaaacgagtcagctctttgcattaggtggccaaagtgtctttttgaattatgcttttctcagggtatatgcccagtagtgggattgctgggtcatatggtagttttattctttgttttttaaggaatctcaatactgttctccatagtggcagtatcaagttacattcccaccaacagtgcaagggggttcccttttctccacatcctctgcagcctttattgtttgtagagttttttagaaattctttccttatttcgctttggccgtgctgtcttccctgctgcacgggctcctctctagttgtggtgagcggcctgctctcttgttgcagcgcacgggcccttctctagttgtggcgagcggcgctgctctcttgttgcagcgcacgggctcctctctagttgtggcgagcggcgctgctctcttgttgcagcgcacgggctcctctttgctgtggagcctgggctctagggcactcgggtgtcagtagttgcagcatacgggctcagagttggggctcacgggcgcagttgttctgcagcatgtaggatcttcctggttcagccattgaacccctttctcttgtattgacaggtggattctttaccactgaaccaccaagggagccccatttgtagatttttttttttttgatgatggccattttgagcagtgttgaggtgataacctcactgtagttttgatttgcatttctctagtaatgagcaatgttgagcttttttttcacatgtttattagccatctatatgtatctgtatttatggtgcaatctgcccagttatatgatgtcatattagggagaccaagactgcttcacctccctttttctggtacatgagtttatcttttccctttctaactatgatcctaaagcttctggattttatttggtttaaatagtttgccagttgttgcctgaattcctacttagacatttagaatacatatgtgtgtgcacaagttgtttcactcgtatcctactctttgcgacgctatggactgtagccctccaggcttctctgtccatgggattctccaggcaagaatactggagtgaattgccacgccctgcttcaggtgatcttcccgacccagggagcaaacccacggctgctgcagctcctgcactgcaggcagattctttactgctgggccaccagggaagccctggagtacataggctgagtataaatgtcatagatcagaagtggcctgcttctttgacattccctagatcctgccttgaactgccatttggtcattaattccacattctagtcatctacacagatcttaaaggtatcacatcttctgtgtttgttttaaagccaccagtgaagactataagctcctggaaaatatgaataaactaaccagcctgaagtatcttgaaatgaaagatattgctataaacattagtagaaacttaaaggatttaaaccagaagtgtaagtaataattttacaattaaacgtgtttatttgtacttaatgttcttttgtgcttggggcagtggagaagggaagggagcatggtctctgtcctcaggtagctaattttctaaaagtgaattacaaagttaaagtgaactttttccactctgaggattagtgtgctttggtggtatggttatttctgcttctgaatattgatttgattcatttatttccggaaaaatgaggcagagggaaagtggccagattctagtgaattaacttaacaatggaatccataaaggactactttataaacagaaaaccataacatatataatcataaaatgctgctttagttggcagaatatattttcctgttgacttatatttgtgttccctgtctatagggccctccttcttggtctgagagtacctaagaaactgagtcagtaatggaaagattgcttgaggagcaaggaatttaagagaggaaaactagtagatgagaaggatttaactttgtttaggtcaccagtcatacctgatcagctagctactgtcttctaaggcatgtgccctgctagtgatcagaatcatgtcactccacctactctgtcttaggcagagctgaagagacactagcatggttactttccacctttttctgcattccttgctgatgctgtataaaccctggtttgtctttgtttttaaagatgctggactgcagccttatctggatcagatcaacgtaattgaggagcaagtagcagctcttgagcaggcagcctacaagttggatgcatattcaaaaaaactgggtaaccattttttttgttttgatttgataagagcaccctcctgccagtatgaccttatatgatagttaacatttatggtatgcctacagtgatctattttaatctcacaaaacctctggagagtaactaacttttatgactagtagtaataaaataacatttcctgagtgcttaataatatatcaggcactgttcttaatattttgtgcctattattttttttatcctttaatatctgaggtaagtacatgatttttagccccattctattgaagaggaagctgtggttgaaggagttataactggcagagttgcacagtgaaagtgattaaggacacagttagtatatagaagagctgcattccaaagtatgattgatttcaaagctcaagcttttaattgtggttcagcaggctgaagcatctgtaataatgtagatacacatctcagaaacagagtaggcagtccaatcaaggctttcttaaggggttacttttcctttaaggaagaaactggtactagcgttgatgccttgctacctgactctggctcttatatccatgattaaaaataacaaagttgaggtctacaacaacacagttgattttaccctagatataatttacatgttatttttaatcactgacaactgttgactacttcaagcgattgatttatagcagactgagatttgacatgggtggtagttaacgtccacagttaaatttactaaatggtgactgtgaactttagaaagcattgtgccagatgctttcagggttttaaagaaagagggaatctataacattaaggggtttacttgatggtcttttaaattccggtacctttcaaaattgttttcctagtgtgtatgagggataggaataagaaaaggagaaacatacttgagatttcagtctggctctcagagggtgcctgggacagagcctggaggggcaagtgcttcctaggcttttctaaggctcctggtggctcaagtgctaataggtttgcttagccctggtagagtgtctgagcaggtgctgttgacagggctagaatgtagggaactcatgttagattcttggttatgtgtgtggatattttgtggatatttgactccttaagttgtgcacactggttatatttggacagatatccaaatatctgtccgtagctaatatgatagttagcatatggtgtacccgtaatttggatacagtttggatagctacaaggaccgaagttaatagatatttttttaatgtagtagacatttttgaatttgcctggaaatgctaactaaagagtatctttgtaagagctgattttgttttttatgttttagtttttggccacatcgcacgggcatgtgggatcttagttccccaaccagggatccaacctgcgccctctgcattgggaagtgaaatcttaatcactggaccacggggggagtcttttttatttttttctttctttctccctctctctcttttttttataagagccaattttaaaagatataactcttcctctccctctccccactgcagaagccaagtacaagaagctggagaagcgatgaaaaactactgtggggacaaagtcttttttaatgtgggaaaaatgttttataagacctgaatcttgaggttgatgaattgtcaaaactcctcaaaaggcacctatgctggtcgtcccagaaacatcgcaacattggagtaaactggagaactgtggctatccctggaggaacttcttttgaggcagaatcctcagaaactcaacacttataactccttaccttttacttgaatgcttcatcatccattcaggacaaagagtttctcaaagttcagataaacctgggcctgccagtagaatcaaatgagaggacctcttttccctggtagcagttgattactatattattttcttaaatggttggtttttgagttactgtgtaaaaggtggtttttttctatcaaggatgtaatgtattgctaacaagattctaaattaaaaaaggaaaacaaaacagtcttgttcttgtcagtttattaccttgtgaatgtcactaattta

SEQ ID NO: 155 - DNA, 4362 bp, Hippotragus leucophaeus
  source 1..4362: mol_type = genomic DNA
ctgagtcacctgggaagcccattgttggtagaaattccctactaaaaggttaagctttgtgaggacaaggaaacaagtgcctggggaacagtaagtgctcagtttgttgaatgaatgtctcaccgagtcttaggtgctgttatgatcccattttacaagggagtacactgaggcacgcagatcgaatcactggctttcacacccagggtgagtggcgcaggcgggatttaacccgggcagtaagtcctcaatatataccaagcaatcgtaattactaccctcttactctgtgtcaggttttgagctaggagcttgtccccgagctgtctcgcacagttctaggagtaacccgcgaggccggccctgtccggactcggctttgcagaggcggaagcccgcagtggaggtctccccgcgatcaggggctgggcgggtattcggcccgggccgctgccgcgccctccgcgcctcccgggggcctcgactggctttccagccgcggcccgtggctcctccctaccaggacccggcgctcaccccggggccggggtctggatcttgagcccacagctccgctaccatctcggtgtgcagaaactcgaacagtaccgggtccgccatgagcgggtcagtcgcctaacaaccgctcagtgtctcgtgttctcattggcccagttgggcaagccccgcctcctgcttcttaagtgcggcccacccactcctgcttccattggtgtttcaggctagccccgccttcctttcctgggctctcgtggtgcgcgcgtgaacccgggagtctagggggagggcctgctttgtctgtaacggccgcacgtgacaagcacctctgcccttcctgctgtttcttcaccgtttccgggtctgcgagcgtttccattggtcgagtcgctggttacacgtgacagctcttcttttagactctctatttgtccactcttctcgcagcacaacccggaagcgccagcccaaccgctttcctattggccgtgcccttattcacgtggctctttacagaagccccaacatctggtccggaggccttacttcctggttggtagctgggcggcccaggtgataggccgccgacacccgcccaactttctccgctattggttggggctgccgcgctcctcggtaaagacgccgcacttcggataggtagaggatcccgcaggctcggagctctggtgacccggtacggtcttcggtgataacgctcgcctccccctgcgccttgtgcatcctcccccgagtccatttggactgttaccctttctgtggtggagtccctgattcccgagcggctcagaaacccgtgtgcttccgaatccgtcacaggctaagagatcagcgtggagggtgtggcctctgctaggaagctaaatcgggaagagtttaggattccgggacctcgtgtctcagagtcttgatcgagctggtggtcctcagttttcccatcagtacactgaagaggcagaatccagtagttcctaccatcattagtttgcagaaactgaaccgcaggcaggcagtgaccccaaattgttaagatagtggaggaggtgagaatccagaaactgcggcttttaaccacggcacggcgccctcctctcatatcatcctttcccgcgtcttctccctagctcgcgccatggagtctcagagtcgtcggcggaggccgctgcggaggcctgagactttggtgcagggggaagcggccgagtcggactcggatctctctgcgtcctcgtcggaggaggaggagctgtacctgggcccctcgggcccaacgcgcggccgccccacgggactgcgagtggctggagaggctgcggagaccgactcggacccggagccggagccaaaggccgcgccgcgcgacctgcctccgctcgtggtgcagcgggagacggccggggaggcctgggcggaggaggaggccccggcgcccgcccctgtgcgctcgctgctgcagctccggctggctgagagccaggcgcggctggaccacgacgtagcggccgcggtgagcggcgtgtaccgtcgcgcgggccgtgatgtggccgccctggccggtaggctggcggctgcccaggcagcgggattagccgcagcccacagcgtgcgtctggcgaggggggacctctgcgcgctggcggagcgtctggacatcgtggccagctgccgcctgctgcccgacatccgcggtgtgccggggaccgaggctgaacaagacccggggccgagagcctagccgtgacccactgtctccactgactgtgccctgggggtaggccttgtggcctcttgacctggctctctgctctgtttagccacccacccatcttgctgtcaccctcaggggtaacctcgcccctggataatgatgtgtgtgtgtgtgtgtgtgtgtgtgtgttccccctgctggaccgtagctctggttcctacccccctgggcttggcctttgcttcctggttcagagcttgtgtctgaaacttgactccagctcctgggtacctatctgcccttggatctgtctccctcttaacagctcacggagcctcatctttccttgctctctgccttcctcagtttggtttctgttcacaggggctggacctgctgctttctccccacgggagccccagagtcccgctgaatgtcagttccctgatatcttcctttactcccttggctctgtctccttcttgccccacttctggaattttgtccctctgatcgggaccctttttctgctccccaggcttggcctggattccatctccgccttctggtccttgctctgccacttcttggctccttctccttgggcttagccgtaccctcttggcttgatcttgtttcctgggtccagctccacccttagttttggttctgcttctttctgcttctcccattctgtttaaactacctgcttacttctgggctccagggatcccctatgattttcttcatcaggtccaagataaggttccctcctgacccaaggaggtcccccttccagctgtccaggcccaaggtggcatctcctccaggcccaaattggtgtatccttcccaaccttctgcccaagctccaggtatgagctccaggcctcggcctgactcaccaggctgagagtgcccccagcaggcactgagggcccagtacagacttgccctggaactttatgtgcaatatgacaccactttgcagataagtgtactttgttaactatgttccttggatgctatagatgctaaactgcttggatttctgggttagctccttctgtctcctcctcctcactgctccctcttctcccagccccagcccctcagtcccattcacatgcattcccctcccccactctcttatcccaacccgagctgagatctgagctcccaggatgaagaagtgctaaggaagagcactgtatggcaaactcattaaaactcaagacatgcactgatatgatcagttcctcttatctccccatctaagctgggggtgggggtgggggcgggtcagttggcgattctactgccagtgtgagtcccaagaaagggatccttcccacctggccgactgaaagtggacctgtggctaggagattggggccccaagttttttccccctggttctgcacttccttgtgttttgttcattcaccacacatttactgagctcctgttccgcgcctgtcctgagccaagccctggggatgccccacccaggctgggccctctcagagccgacaatccactggggaagacagacatgaaaacattattgtataagtggataatcttaataattgtaatctatactttgactgtaatttttctggcattgtggttagtgccctaaagaaatgcaggagttttgtgagagtgtaactgaaatctgtcagactttgtttggaggatggtcagatggcttccgtgaggaggtgatgagtgagtttgaggtgtaaaaaaaaaaaccctgaaggtgtaaaaaaggtgaaacatggcggggtggaaaactgttgtgcgcggcatatgcaaaggccctgagtcagaagaaggcgtagcctgtttaacaacagaagagggtgatacattctagtctctactggaatggggagaccaggggagttgggggtggtgaggactgtgctagcaggggccagacaaagctggagttttaaaccaagtaaaaatccttggtctttattgaacagccaacgagtagagaaagatgccatctggtaaatgtgttttgtgaaggagcctcagactggtgcttctgcagtgtggttgcctctgaaaaagacccagaaatactggtttcgaaac

SEQ ID NO: 156 - DNA, 1654 bp, Hippotragus leucophaeus
  source 1..1654: mol_type = genomic DNA
ggttggtcataactttctccaaggagtaagcgtcttttaatttcatggctgcagtcaccatctgcagtgattttggagcccaaaaattaaagtctgacactgtttccactgtttccccaaaatttttagagatttaaaaaatcttttttaattggaggccaaaagggagtgatgctaactgatgctctacccataccgctcttcggtggagagtctttttttttttttttccccaagtttttttttttttttttttttttttaagatttctgagcctgagcacctgcgcgcagagaccgcagtgcgcgtgcacgcccgttcaacggctggaagcggagatgagtgcgcatgcgcgagcgagtgggggcggtcccctagaaagggcgggtgtacgtgcgggtacgtgctcgcgcagaggccggaagtagtgccgcgcgtgcgcaggtgcaagcgcgcgcaaagcccggaagtggggttgtctatcccggcggttacgggctatggaggacttcccgccgagttgcgggccggttggtgaggagccggccgaggaaggcgaggctcaggtggcggcctggagcggggacagcggcaatgtgtcgcagagccacagcagcgcctcggggccgtgggaggacgagggcccggagtcgggcgcgccgagccgggacccgccgctgctgcgccgcgccgccgcgggctacgcctcctgcctgctgcccggcgcgggggcgcggcccgaaatcgaggcgctggacgcgagcttggaggacctgctcaccagggtggacgagtttgtgggcatgctggacatgctgcgcggcgactcctcgcacgtagtcggcgagggcgtgcctctcatttacgccaaagccaccgagatgcggcgagtctacagcaagatcgaccggctggaggccttcgtgggcatggtcagtgccagtgtggccaggctggaggagcaggtcgccagggctgaggccgagctggggacgttccccagtacgttcaggaaattgctgcacacgattaacgtgccctcctttttccacaaggcgccctccggcaggtcccagctgaccggctacgaaacccccgtcgtctttcggacggaagaccactttccctgttgcagcgaaagacctcaggtctgagtctgccggacaccgctgcaagaggacaggtctgaaattatctcgactgttaatcagatcagttgaaattcctgttaccggacatctctgatgttggagtatggaattgtaaagtttgggttttgcacacttgattgctcactctcctcatgatttcacgtggaatgtatggttttctctgtcttccagttcaaacttgaaacacgaaagctgcttggtaggggaatcccggaagcaaaatgtatgaacttacctgcacactgtggcagaactgttatttttaggcattttacagctcaactaacagtattaccttttcaacatttgtatatttgcagtactcttaggaaaactactgagcccttaaagccttgttaattggagcctaacaacttgttgaccagagacgtattcatacgtcttttgttacccaaactattgcctggagacagtttgatattctcttatagaacagatcaacggccacagctgttaatttc

SEQ ID NO: 157 - DNA, 24161 bp, Hippotragus leucophaeus
  source 1..24161: mol_type = genomic DNA
actctgtgtgaccccatagacggcagcccaccaggctcccctgtccctgggattctccaggcaagaacattggagtgggttgccatttccttcttctccaatgcatgaaagtgaaaaatgaaagtgaagtcgctcagtcgtgtctgactcttagcgaccccatggactgcagcccaccaggctgctccatccatgggatttcccgggcaaaagtactggagtggattgccaatgccagcgggtttagggaggaggaataagtttatctctaactttcagacagcctctgccggcagcacctgccctaaaccagcatggcggcaccggcttccttcaaggtcaggtcactgactacaccgtagtgcccttacgggaaccgcccctgggttgactcggcttcccgggcaccttttgatgacgccaaagccccgcgcagggagagcggtccgcggaggtgtgcgcaggcgcaacgcggtcgcgggtgggcggagctggtcgggatgagcggcggtgggaccgagaccccggtgggttgcgaggccgccccgggtggcggcggcagcaagaagaaggactctctggggttcgcgggctcgccggcgcacctcattatcaggggtatggcgtagcagggttctcgcctggtggtcccagcgcagccccaccgaccaggcggcgccctctgacccggggcccagccgcaggtcgagccccggcggcctcgggtttgcggcaggctggggatgggggaccctggcccgggtgcaccccttttctccgcgcctggtgcctcccagcaacggcaaaccgacccagcccctcctgcttccttgtagaagccgcctgttttgaaagtttatattaatcactttatccttctgaaacttgcctttgtgcttgacgttttatttgtgggattttcccatgttaattaaatgttaccccactgtattcatttaaattcactgctttgtagtatccatattaagttgttccccaccccagccccgccttttcctttacttatactcgtcccgtagtaagcaatcatacattgtctctcttttgtataagaggtttttcaagcgcacatactggagcgtgaaattgctgggtgtgcatgtcttctaactttactagatgtggccaaattgctctcaaaactagcgattgaccaaccagataatccatagcctgaactggattttaatctcagcatgaaattgctgggtgtatatgccttcactttattagatattgcttaattgttctcaaaacggctttaccaatttactaaccggataatccatagtctgaactggattttaacctgtgtatgtttatggggaacaggaagagtgaaacaagctagagattgtgccacttagcatgggttgaccttgaatttcattttctctacagatcttggagaaattcattcaaggctcttagatcacagacccgttatccaaggtgaaacccgttattttgtgaaagaatttgaagtgagtatttgcaactcattttgcaaaaataccacctgatctgctagtgtgttaatacacagaggggaactctctagttttaaaatctctgatttctgttcttgtgtctataaaatatacaatgtaaaacttattaagagacattgacatgaatagagggagcacaagtgtaggtgggaggagcctcgggctccaggtctggggtctgctttggctggtttactgtctgttgagctcagttttccttcagtaagatgttgctgctgctgctaagttgcttcagtcatgtccgactctctgcgaccccatagacggcagcccaccaggctcccccttccctgggattctccaggcaagaaccctggagtgggttgccatttccttctccagtggatgaaagtgaaaagtgaaagtgaagtcgctcagtcctgtctgactctttgggaccctgtggactgtagcccaccaggctcctccttccaggcaagagtactggagtggggtgccattgccttctctgtctgtaagatgaggtatagtaaaaaaaaaaaaagagagagagaaaaaattttttaagatggatgggtcaattttccagaccccttttctgtattctttttttctcatttgaggcagcagcatctacccaaagctctcaagttaaagcatgagaatcacccctggctattccctctcctgtaggtcacactcagcgatcaagtttctagacattactgcacaaatgtatcctttctgatcggtatgcctgccctatcaacccagtcaaatctagtcttcaccctgctgcccgagtagtagttgttgagtcgctcagtcgtgtccgactctttgtgaccccatggactgtagcatgtaagtctcctctgttgtccgctctcccaaagtttgctcagattcattgagtcagtagtactatctaaccagctcatcctctgccgccctcttcttttgccttcaatctttcccagcatcagggtctttccagtgagttggctcttcgaatcaggtggccaaagtattggagcttcggcttcagctttagtccttctaatgaattttcagggttgatttcctgtaggattgacaggcgaaggaactctgcccgagagtttaaaaccctcagatgtcattttctgtctatagacaaaggccagtatcctgctgcgacctggtccctgtctttctagctggaccgtctaccacccagcctcttacgttctgtcccacagtcgtgatgcaccagcctgccgtcctgttgcatttgcttgtggttttgcacatgtataattggttcactgtgcaccgcatagtaacacccctcgctcctgataggttgatggtggttaatggtgttacacaaacaattttgtgattctctgtgagtcaggattttattttcaagtgagactccaagcaggaagtgttcggtctgccaaaaggggggaaggtttccataaaccctttacaagtccagaaagcctctggtacagagcactcaggcacggacagggttgctgcactggacaccatttctgggctcagcagacgcaagagtctgcagaacacctgcttcacagtgttgttgtgaagatgaaaggtgtgtgtctcttggaatcttttctggtacctgaaggtggctgttggttttcttcgtcatcgttttgttgcaggataagaatagttacctctcacacagaaaattcactagaccctgttcccttatcctgctatgtaaagatcgttggcagttccttgctgctgctgctgctaaatcgcttcagtcttgtccgactctgtgcgaccccagggacggcaacccaccagactcccccgtccctgggattctccaggcaagaacactggagtgggttgccatttctttctccaatacatgaaagtgaaaagtgaaagtgaagtcgctcagtcgtgtctgactcttagcgaccgcatggactacagcctaccaggctcctccgtccatgggattttccaggcaagagtactggagtggggtgccgttgcctctccaggcacttccttagtgagaagaaagtctaggtacagtgtggtgggtactctgctcgaggtcttacagggtgaaaatccggggctaggccaggcgccatcgttacttggtgctcatggtcctccggatgcctgtgactgtggcgggactcacttcctcactgaggtagacgaaggtcccgtttccttgcttgctgtcagctgggagtcactcggctccgagaagccgcccaccttccttgccatatagtctcttcagagattcgggcttccctgtggctcagctggtaaagaatcccctgcagtgcgggagacctgggttcagtcccagggttgggaagatcccctggagaagggaacggctacccattccagtattccggcctggagaattccatggactgtatagtcagtccatggggtcgcaaagaattggacataactgagcgaccttcacttactcactcactcactcaaagacttaacaagtggagactccatcaggtggaatccctttcatgcttcaagtctctcttgccgagaagagcacaggccttgttaaggactcactgatgaagtcaggtctccttggaatcatctcccttaaagtcagctgatgtgagactttaagtaaaccatagagtagcttcacagcaggacctcccttagggtttgactgaataactgacaggtgtctgtgggctttccgtgtggtgcagctgtaaggaatctgcctgccgatgcagaagacaggggtttgaccctgggtcacagaggtcccctggagtgagaaatggcaaccctctccagcattcttaccaggagaatcccatggacggaggagcctggcgggccacagtccctgggggtctcagagtccagcaggactgagcagtgttgctgttgcccagttgctcagtcgtgtccagttctttgcaaccccatagactgcagcacatcctcttctcccgcctttaatctttcccagcatcagggtcttttctaatgagtcagctcttcacatcagggggccaaagcattggagcttctgcttcagcatcaggccttccagtctttcctttaggatggactggttgcagtccaagggactctcaagagtcttctccagccccacagttcaaaatcatcaattcagctttctttatggtccaactctcatatccatacatgactatgggagaaccatagctttgactagacagacccttgtcagcaaagtaatgtctctgcttgttaatatgctatctaggttggtcatagcttttcttccgaggagcaagcgtcttttaatttcatggctgcagtcaccatcttcagtgattttggaacccaagaaaataaagtctgtctctgtttccattgtttcctcatctatttgccatgaagtgatgggaccaaatgccaggatgttagttttctgaatgttgagttttaagccaactttttcactcttctctttcactttcatcaagaggctctttagtgcctctttgctttctgccataagggtggtttcatctgcacatttgaggttactgacctgcatacacatttctcaggaggcaggtaaggtgatctggtactcccatctctaagaattttccagtttgttgtgaatcgcacagtcagaggctttggcatagtcagtgaagcagatgtttttctggaactctgttgctttctctatgaaccagtggatgttggcaattggatctctggttcctctgccttttctaaatccagcttgaacctctggaagttctcagttctcatcctgttgacgcctcttagagcacagcacaggctgtatctggaggtgggggtctcagggaccaccttagacttctccctcccataagctcttattactacctatgttttccttactctctgcttgtttattgcccattgcccttcacgagaatgcagacagttaaccgttcttacgctttgttgtatccaagtgcctgaaagagtgtctggtgtgttgaaggtacctagtatgatccaggggagcaggtggcagagcttggactgaaacttggcttttccagcatgcactggtttttccatacgtcatctttctccctgctgcaccaggccgactaatttgaaatactaaatagttttttttttttttaaagtttgtaaatgtgtctctaaagacctgtgtgtgtgtgcgtgcgctcagttgtgtccaagtctttgcgaccacgtggactgcagcccaccaggcccctctgtccaaatcccaggcaagaatgctggagtgggttgcttcccttatccaggggatattcccgacccagggatcaaacccacgtctctgatgtcacttgcattgggaggtggattctttaccgctagcaccacctgggaaggagattgtttattaaagaagaaaaatttcacactggatatggtagatgtaagcttgatgtagaaggtccaacacagcgtcttgagcactttgcgggagacctcgagttaggaaccagcgctgtatccatgggtgagacagacccaggcccctcttcaggcagctgggctgagtcctgtcctcacggtagaatagtctctgaagggctcagagcatttcgtcaccgttctggcgctctctgcagctgcctgtcgcatcactcgtcttcatgaaaggtccctgatgctggcctctcccacagtcacctctggggcggtctttctgggagttcagtggaaattcctctacattgggctcagctggcttttctgttacactctaacctttccccctcaaattgtgagggagacgctgagagtgttttagagatttagagttgagtagatatgtgcactatttacagctcttttcttggcccaaataataccctcctctacttaatgaaagtgatcttccctgagtcacacagctgggccggtaggaagggtgaggagcactgtcagggcttcctggaagtttcccatcttttttattttaatttattgaaatacaattattagtgtttcaggtacacagcaaagggattgagttatgcacacacacattatttttcagactcttttccattaccgattattacatgacgttgaacatggttccttgagtttcgtcttctctagaccgtttaaatgtggttcacttgaagcaaacctttcacgtttaaagggaagcttgtttgtagtttttatatttttaaaagttaatgcacccggcaacaatgatctttttcttgataaaattttttctccgaaagaaaggagtaagtgccacacggtggcagcgttgcttcagttatcggcatcctgctataatactgtagaccctctttttgtgtttgctagtgtttcaggacccttgactgtcttgctcctgactttgcacagcgcttttcttcccccgattgcagtcagtgctgtgaacagagatcccggcggggcccctcgggtgtgcatccgcctggtggtctcagcgagtaaggaggtgccggacctctgagaggggaggcccgcgcgggtcacagttcatgacctgcggtcctgcgccagctgcttgcttcattttcagcaagtttcattctctgttttattcaagagtttccgactatacccgactgtgtctgaaggaaggtatttggttcctagggacagactcctgaagagagtagctctcctttcctcccacagcagccagagccccacgacctcagcctttcctccagcagggttgctcacgtcctcttgctcacagggtggcttctggaggcctggtatcacctgtgtgtttcctgcagcagaagggaaggcaagtgggaaccggctagtggtatctgttctacaggcacctttaccaccaaatgcttcccaggtggctcagtggtaaggaatccacttgctaacataggagatgcaagaaacacaggttggatccctgggtgggagagattccctggaggaggaaatggcaacccactgcagtggtcttgcctggaaagttccagggcgagaggagcctggtgggttacagtccttgaggtcgcaaagagttcaacacgaccgagcaggcacaccgccaccgcagtgactccaggaatgcttggtgatcaccaccaaatggtatttgggtgttcagagggagagagacaagggaacggatccagaactgtctgcctcagcagatacgcaaaaaccaaataagaaacggtctctacctccagggatttaccagctgcagagagcagattgtgatgatgagattataatgataaaatcagcacagtgattgagatctcatgagggaaccactctcaactgagttgggagggaacttttcagaagaggggctgatgtttgacctgagaaagaaacatagatgttagagaaatacagaaaaagtggaggcaatgtggattaaatttgagggaggaaaaaaagattgttcagatagatgcagtaatgggaagagttgggaaggttcatgttgatgcatttgaatgttgatttattaaagagaaaatcccttgaaaggcaggacaaagtaaaatttcacttgacatctgatctctcattttggttaggttgtaaaagtatctcagattattaaataaaaggaaaaagtctatcccccatatgacatgtaataaatttatatatatatacagtatggttttaggacttgtgggactactatttgaaggaaagaaaaatttaaatattacatcagtctcatttcctctctgatactattacatctttaatgtaaaaatataataactgtactaatagtctgaataactgctaacatttttaagtgttttgtgccaagtactgtcttaagcacattatatgagcacttgttatcagtttcaatttgagaaaagttcaccagatctgtaattttatggggtgttatacatcagaaagcaagcttcattctttcattctctcttaacttctgtatgagtttaaaattagagtaaaatatcttgccccagctgttccataagatggttcaaaacaaaacctctagtaactactataccattatttcctcataattgcatttaccacacttcattttcagtgacctttttgcattgtattattttaagatttacaataaactcactaatacagcacagagtgctcgtgtacccctcgcccactttctcccattattaatcttgtacattaattactgtgccacatcggtaaaaactaagaaactgacaccagaacatgactgctaatgaaacaccagactttgcgcgcatttcaccagttttccattacagcgctcctcctgtcccgggacctaatccagggcagcacactgcttttaatcgtcatgtctctctagtccgctttggtctgtgacaattttttgggctttccttgtttctcttgatcttgacagtcttgagttctggccagtatcctgtagagtgtggccccgtctgggtctgtctgatgttttccttaggattagacggggctgacacactctgggaaggcgtcccagcgagggagcacgtccctctggtcacgtcatctcgggaggtgcatgccgtcgtcatgacgtcactcacgaggtcacctttgttggctccaccctgaagtccatgtttttctcattcccagctttattctctggaagcgagtcactcagtagagcccacccaagcgggagggtgggttaagctcagctttctgaagctggggctgggctccgggtcccaggaccacccccaagtgcatcagttcaccagcactaatcagcaggccggtgcccgaggtttatcgtggctgaaggaggcagagcagactcgcaaagggaacaggtgcctggggaggcgtctagaggaagccacgcagaagctttcaagggtgtctcacccggcggagtcatacgaggcacgcttcactcccccaggagggggttgtgacaacgtgtgatgtgttgtcttccagggaagctcatctgagcctgggggtccagggttcttactggggaccagacaagcagacagcctctgcctggcacatatcaaagttctggactcctggaaggagggacgtgtcttgtcattcatgggaagtgttacctgcttgggggctgttggctggtcaagttcccagtccccacaaaggccagccatgcaggcaggccttcgtaaggtggtctcaggccctgagtgataactctcgtctacacagggaagaacccacatgttactaccttctccacacacttttgagtgaagtggaatcagagcataataatagaagctttatgataataagaacaaccaaatgtaatttaaaatctgatcatttctttgccgcagatgaaatgcatggaatctaggtctcattcttttagtgtttcttatgcccatttttaaacattggtatgaaaatatgactcatatttgcaacttttgaagcatttcataattaaaaaaaaaaatacctccaggttgtgacctcagtcatcgccaaataattagaagaaggctgtatgaatttcagtaataagtagtaacatagcaaccagaacttgggtggaagtctcagaaagtaattgctaagatttaaggcacaatacttttcttttaaaaggaaaaacgtggtcttcgagaaatgcgagttcttgaaaatctgaagaatatgatccatgagacaaatgaacatactcttccgacatgtagagcaacaatgcgagacagcttaaaccaagttctccagagatgtaagccagcgtttttttttcttatattgctttatttcataacgcacgctctgcccaaacggatttcccgggggtgtttggtgggaggtggagacgagagagggaagccgcccagtttcagaagtcaggtgatcagtgtgtgtcgcccttgatgttcagagcaccaacctccccagcaaggtgggtgtgcaagatttcccttccaggatgtaagaaaattgaaacctttttttaccttaaaaaatgtatctgcaagaaaatgtctgatggccaggaattaaggtatgcaatgaagcttcattgccaagcaggacaccagagtttttaacttaaaaaaaaaagtcctgtcgtaaatgtttgtgttttatcactttttgcgttaagccaaatgttttaatgtggaaagatgtttgctaaaaagaatatttttaaaacatatcaaattacaaaatcaaaggagttttatgagtaactgagtttaaaattagaggtgttagaagaaactcggggcttcccctcaaacccacattgatgctgttcagtttgtccaaggacagagggtgctggcaagtaatgaggggcggaagacgaggcagcgtctttctcggggagaaggaaagcaccaggactttcccggtggcccagtggctgagactccgagctcccattgcaggggagctattaatagatcccacacaccgcaaccaagagttcgcatgccacagctgagacctggtgcagccaaatagacaagttttttttttgttgttttgttttgttttaaagaaagcaaaggctggtgacgtagtagcctgtgaggggaaaggtggaagggtttggttaatgaccgagttacatgagggtgtgtgtgcaagtccgggtggtctgcgccctcggatgctcagaggacaggcgacatgtggtctctctgagcggaagagggaagagtctaaacctgatcccgggctttacatgtcgctgcagacatgcccttgctccttcactatgaatggatttttcagtcagtttaattcctgggtcattgctgtttctgatgggaagcctcatgttaaaagcatagtcttgggacttccctagtggcccagtggttaagactgtctgccagtgcaggggacacaggttcggtccctggcccacgatccctggatccatggggcagctccgttcctgcgttgcagctgctgagcctgcacacgccagcgtccgtgctccacaccaaaaggagctatcacaatggaggcctgcacaccacaactagagagcagcccccactcgctgcagctggagaaagcccacgtgcatcagtgaagatccagcatagccaaaaataaattaaatttttttttgaagcatagtcttcacaatgaaatagcaaagtttttagaggtcacagggaatccagacagtaaatgtgtttttctaaaaggaagaattaaaacgtgaggcaataatgaaagttttagcattagaaacgcacaacggccttggggtactgctgctgctagaaacaggaatggcttccccagtaggctccagcctaaagatggccttgtatctcttatcacgaacgtcacaggtataatggaggtaatcgtttgcttttagagccagcatagttttttttaaaaataggcctgggcccagctgctgttcctggggaatttcatgtttgaaaagttgacattttaagccgcaatgctggcttgtgtttatctatgggatacactctcatctaagtaaattaaagttaagctacaaggttagtgacagtggagttttgtcttgtgcctgtcaggcctgtcttagctctgcacatctgagagctgagttgggcatgcggtcagctgagactcccaaaacttggtgtgcggatcttcagctgttggtctaacactgtgcatggaactgagctacagtggggcgttggggggttggggggggcgcatcctggactgttggcacggagccggttatagaatcctagctgagcgtcttagctttgggtgagcagggccgacagagccaagaatcacctgtggcttctggaaattttaaccccggaaagtccctgggttctgggaggatgtgtaagcggggagagtgacccaggcagcaccctgtcatcaggacacagcctttacatttctccatcccaaagacactgctgagtgtctgttcttgcttagaatcaggaaccaggcctccttttgagagggtaaggacagaaggtctctagggtgtttctcaatttaactaacaaggccatagtaaaagaattttctctcctttcctgccttcctctctctttttaaaactatttttaattatttaaacacacagatatatgtctaagtaataagaaagtagaaataaaaaaaataagaaaaagaaagcaataaatcagtttaattatctaaagataaccgttggtttttaactttggtgaattatcacaccaacatctttgtgtatatatatatcgaaatagaaggctgagtggaggtgttacctgaatgaacagttgggaaggtgtaaggggcagaagagaacttttggtaagaatgggctcgggcaatttttaagttaaggtgttaatttttaaattttacttgaattcagcagaacaaaatctcaagtaaaactgaaggaaatacgttaaaataattgtttctttgttgtaagagagagttgttgctgaaagatcagtcagagaaaaataatgattgaaagtcgggcagaagttagagcgctgttgtttctgccttaggtgccaggggcggggaggctcaggacctcaccccttccctctgcttctccccctccagcctctcagttgtgacccctaactttatttacaagtgaggttttacagtatttgctttccgttctgcagtaataatgctgccaactgtttggtcttcagttcagttcagtcgctcagtcgtgtccgactctttgcggccccatgaatcgcagcactccaggcctccctgtccatcaccaactcccggagttcactcagactcaggtcagtcgagtcggtgatgccatccagccatctcatcctcggtcgtccccttctcctgcccccaatccctccccacgtcagagtcttttccagtgagtcagctcttcgcgtgaggtggccacagtactggagcttcagcttcagcatcgttccttcagcttctttctgttttggttggtttttagatctgtaatgatgtgattatcgttctgtttccttagctctgcggtctcacttttcatgccgtgtgtttgatgtcttttaataaactcgtatgactatttttcttacagagcatctggagaaagctgaggctttctttcaagttggatgcgttgtcttatctgcctctcccatattgaatccctttctccctactccccctctctgtttctctgcaaattaaagcgtgttgaagttctaagaattttgtcagcccactttctctttctcagggtggggtggttatggtgcggtgaggcatctcggttcttcattgagtctgttccgtgaattaggaacagcctaaacgtggagtaggagatgggaaaggttagggaaatgagccttttccttgtggagtctctaaagaaaagtgtagtcacttctaaggtagttttcttaggttttaggaaagcaggtttccttaaattcggaaagtaaatctttttttggtcatgtggatgaaaagttaaaaaatacgttacttcagagactgagagttctacagatggatggatattctaagtatgaggataactgtgataagaaaagtgtgccttcgtcagatgcattctaattaagtttttaaacagcaaaataaatgtcatgctcctgtaactcttagattaagcccagaaaacggtgaaaatccataaaatggatttttttaaaagttatgttcagaaccagggcgggtgggggggaagccaggaaatgatggaaccactgctcaggagagatgatgtaatcttaatagaccacagaaagaaggcagatctaatcaactcctgttttgttttcagctttcctattagaacaaacagtgattgggaaccttcactcttagtacttcagtgttatctttgatttgactagaacaaatggctactgataaaaacttgactttttaacagtggcatcctcctgtttgccatgctctcccagggaggggcctaacattcttttgaaggaagtcccggtgcctgccctgcacggagctctgagctccctggggctggctcggggcaggtagaaggcgtacttgtgaaacagctggggaagcctctgtttgaggcagtgcaaggtcacgtggtaggatatagacctgcctgataaaagaatttcaaataagagtgaatccacatagggaagggattcacctggagggctttatgaaggcactaaacctaggagtgggcttttgagatgtcaacgttataactagaggagaggagtaaggaaagcactttgcctagggagaggccagggtgtagaataatagtagcagtaactttcttgactgcttactatgtgcaagaacctctgctctgagtggcttttactgttagtgttaatctttccgtggtttttaagcatgctggtttttaagcatgctgtctacctcgttacctatttctcctatcagctcttaagtcctctcaccagtcgttacgttcatttcacaaatgaggaactaagattctgagaggtgaggagcagcagcggtagcacctagtaggtgctcgagaaatcacctaacaaacggctgagtgagtgaggaagcagacacgccccagagcagttactcagggagtaagagctcagctctaggtgtgactgacagaggctgactctcagcctgcacgccggccagcaaagtaagtgaaacgtgtgtgcagaaataaaatgggtctgggaaatgaagaggtttggcgtgatagaccactgtccttagtgaaaccataagaggggtagagtgttaaaggtgagagctgaggctgcagagtcggggtctgattttaagtcctgctctctgtgtctgttagtcatgttactaccgttacagacatttcccttcttcacacctcagttttttttatagatgccaaaaatctatagaatgggacggtgatcctcacctagtaggaaagtggagaggagtgaaacgtggacagtacttagcacagctcttggcacagtcatactcagcaattagctgcagtaattattaccagctgttgcaattcattgaaaagggaactgactcgaaagcaagcaggccagagaagcctgggtgtggcagtggcagccagggtgaatgaaaggatgggagaggaggcgagaagactagcagagggtcattggagctttctgggcatcgatcaagtcctgcctgcaagggcgcagcagtacggatgaggaacaggagggagtgggtgaatcagagacgctgtacaggctgcctccatcagaggggacagtacgtttaccaggtgtttcctatcttttcagagaatcctgaggtggttgatgatttgtcatcgaaattggtactaaatgtccttggctcacaaacgatagtggttctcattatgccattccaaatcctttttttttttcactttttagccaccgtgccgtgaacaaaaccagcttttttggtgtagtttcttgaaatctaagacaatccaaaatgtctttttgtttgtccttttgttttttaatccagataagtctccccttgagtaagggctggtgactgaaaatccactgtctgttttgtttcagtgcaagcagctactgacaccgtctgtagactccagcagagggaacaggagcgaaaaaaggtaaaagtggaacctttggataatggagcctgtaactccagggcttttatcattatattattagcagttactttgggttaaaaaaaaaaaaaaaaccacacacctctgaatttgttttcttttatgcagtgatttttaaagattaaaaaatggctgattcattgaagatgtgctgagtcagtgaagtcacatagttgcactctgtatttttataattcagattgcagacttctttttttccctttccaacatttccatcttttccctgaaaatggatttctctctaggaggcgaaagaataggacttttacatggaccagaaaatacccaccagcttagaaacagcagtctttgagcctgaagccttgagtgtatattttttctagagaaggaggcattcctgcctgtggactggctccttaatgactaatctgagagtgtgtgaatcacttgctgggtagtgctttgcttatttaaattatatcttaactaaattcaggtgtggaaaaacagcacacgattttaagttcccgtgatactttggtgttttcggtttaaagaatttttataacttatttattactctaagccagtagaaatatacttgttaagaaatatggaaaatactgcctttttgcgtgtagtatatcagcaagtactactgtctccatttctctgcagtgtgtggttggttaacccatgataatggtatggatctgccactgcaaaaaaaaaaaaaaaaaatgaaccttgcccaagtttaaatttctcaactttctgttcaactcttaatgttgatatgaagtttaaagattcagcagtttgatgaatcaagacttaccaaaaggacttgatgattaagccaggtgggaaggctgcctgggaggaacaggatcccagtgggccagggggaagcagggctctcgccagcacacctgtgacctggcagggccgtgctggccggggaggtcggggcgtcgtaccgcccggtgtccagagagcatggcaagggtgggcggggcccggctggaccgcaggtattgttctggtctctacttgactaggtgccattggggctgaaagattttagtttaaggcagaagctaaagatctaggaatcccaaaccactgacactaatatagtgtaggatcaagttaagacctgtcgtaaagttgtggggaactttgcatggtctgggcaaaaagtgtctttactaggaggatgggggcgccccagcccaaccttgatctttgtgtaggaatgcaagtgatggaagatgggaagaaagatactgtaggacgggacagggggagcgaagcaatggatgggagaggtcaggggtccagggagctggcgtgtggagtatccacgtgggtctttccggagaagaatgcagagaaccaggcctgagatgtgaagcagtttgtttcgaaagcacccgggacatgtttatgtttgagaatcagggagactgtgatagagccctggctgtaacatacgcagttctcatggctttcaaaataaaaatgaaaaagtcttttttgtgtgtgactgtgcattcgttattgatcttcgtttctaagacattctcagagcaattctgatttctgataaaatggcaattcttgccattcttgagcagaactaacctaaaattaagttatattggggatggatcgttcttcttaattctttgaacttttttcacagctggtgtattaacagtgtctaaggaggaaaattaccagattgggaaaaaaaatacatggtatcttctatttttaggtgcttgcctttgttagctaaccttatgcccttgggtaagcccttgagcttcaacacaaatgctggttgttctcaccgggtggattgatggtttctgtacctgataacattgtgttgtgtaatttatgtgaaatagtgttactccaaatgtcaggcggcatttttcccccaccagcttgatcgtttggttaagatgcaggcaatcactctgtggataagagccctgctgtggtctgtagagttggtgaagttcttaagaatcctgcctgttgataattttctaaattaaaagatactgtctcttggtttaaaaaaaagagcctcaagaaataataaagcccttggggattttcatcttaagtataggtattatctcagagattgttattgaactgttttttaaaatggaatacacattaaaaatcagaattttagaatacattgaaatatctttatttgttcttatctagttagcagagcatttgaaatatggatttttaaagtctttttctttttcaactgtcatacctggttttgccaaaactgtgtggcagaggtttgggactacatatatttaagacagagaagtgaggcttaatttctcatctagcaagtctgtaccaagcaaaattgacctctagctgcattttacagtctaatgtgaaccgttccttggttattcccttggctgcattttgtgtatttgaacggctctcagaacaaagaaagatagtcgttactgctttcatattgagacaatttatggaattctgtgggaagtaaatcataataaatgtcattcatccaagtcacatttccgcaattgatacctaaaagtacactctgaacaaccaatgcgcattccccagctatttgacatatgccttaaaaactagtaacaaatgcaagttgcatattgggtgctaccaataagagtagtgaaatgaaaatacacatggctgataaaattcagtgacgtaaataagctgtcaaaagctagtctacactgaggttcatgcacaagcatcaacttttgaagttctgttcaatcagactagagatagtaataaagtgaatgtgaatcctttgattcatctgtccacaagtacttactaaatttagtcttacttcttgttttgttaagagagcagtgaggtagtgtggcttacggatttctcttgatagagtttggagatggtaggtagtgggttagtacacgaggctttctgtatccactggttctgcatccatgaattcaaccaaaatgttttaaatggatattttttaaattccagaaagttccaaaaagcaagacttgaattcgccacatgccggcagctgtttctatagcacttacgttgtacctgtgtagcatttgctttgtattaggtattatgcataatctggatatgactttaaatgtgtggaaagattacgtacgggttacatgccgtgtcctgtaccatttctctaagggccttgagcatctgtggactttggtatctgtgagggtcctggaatcagcaccccacagatccctcagggtgaccgtacatcgtgttttaagtactgaagataactgcacttgttattctgacacttaatactttctcatttatctgagtaaggcatatgtaagattaaaggcacatgtattgcttacagatattccaaagaaccttttagacagccgttggtttattcagagttttcccttagacccaggcttttcactctgcacttttgatattttggagcagattaatctctcttgtggcgtctacataggatgtttggcacatccttggccgctaccccccagacgccagtataaccccttccccccaacctgcattgtagtaaccaaaaatctgggggacagaaggcaggagtgtcagagtcacccccccaggtgagaattaccagcttagataaagcgtgcaaaaatgttcctgtgtctatcacttcttttatagacctggtcctggacacagtttgccttcaggactgacttcacatttatctccaatgggacataaggaagctgggttattattactatttctctgttgtagaaagaaacaaacctttacagctaattacttttagtactgagttacggctccttagtaaacttttcctttattttcttttaaaatggggttttcttttttatcttgagaaaacaaacatgtctacatctttgagtatgcaattgatttcatttgggaaccccacccaccccgaaacttgaagttttttaaattgtgataaaatacacacatacatagtttggggaagtattaaacataagtctggaagagattcataaaaagcacatttcacagtaaattctagaaattgcaatactgtctttatttctttggaaaccattgtagtgggtcccagtctccacaggataaaaattttaagtacagagtaaaaatatgtgaacttaggtaaacattgtcatgtagaattctagatttgaactaattcaggctatttctgcaactgctctgctgtcatttttttttttttttaacacaagaatattaagtaacccaggggttagaggggctgagcatctaaggaaagcatgtgacatgatcctgaactgcttggagtttactttggaaatgaacgtgtgtaggcaactcagtttgtccaggattggctctgtaactggaagtcccttaaattaacttagagtttattattaaaggataaacaatgaaactgtcttagtttgaaacttgggtattactgaactttagcagtaacctcagcaattttttagaattcagaccagagaaggatttgggggtaaggagtcctgtgtcgctgaccttagtgctgccagtgcctggtgataaggaaatccagtctctctggattgttgtgtgtgtcactgatgtaaactttgctaggacagggcgccctcttgttgcttctgctcaggcagagctctccccgctcctgctgggtgcgccattagtatggattgtatcattattgaaaaattgtacatgcagaccagcacgtgtgatatgactcccttttgttattaagtaaatgtttgtatcaacataggaaaaagtctacaagtgtagccatccgactagtaatagcactagaaaaaaggaaatggatttgatgtatatgtggggtagaggagggggactgtccctttatattcttgtgtttgaatttgtttctacgctctgtaatacttctttaataaaaatgaaggggaaatgctaatccaagagaaattactgagccataaatatttacactttctgttttgatagatttttgcaggttgctcgccaaaaatactaattactctcaccaccatgaacatcaacttttgaatgtataatttaagatgcacatttttggtagctgctagaaattttaactgcaaaccataattacctattacaggtaatttttaactacttattacaggtaaatagtttgattgctatattgcgttcttctgttggtcgtatgtgaatctgttgagcataaggacagatgagactatgattcttcaagagtgtttcagctagaggaatccttgtttcagactgacacagagtccctttatttgaccttaaaagcagaattactgcgcgcaggagatggtcgtctgaagttagctcactgtttacaaaagatttttcctttttttaaaaatttattttaaattggagggtagcagtagtgttgagtcacccagtcgtgtcccactctctgcgaccccgtggactgcagcccgccaggctcctctgtccatgggattctccagccaagagtactggagtgggttgcaattcccttctccagaggatcttcccgaacccagagatcgaacctgggtctcctgcattgcgggcagattctttacggtttgagccacaggggagaccttaattggaggataattgctttacaatgttctgttggttctgccgtactacaacatgaatcagccattagtatacatatatcccctcccttgcgagcctgcctcccacccaccccgtcccttatttgggagagtcctttttaattgtgaacagagtcactggcttgttaggctgggaggtgtgctccgattgagatgtgcttcggggcatctttgctgcttcagatggaggagcagttgggctccgtgtcgggaagtcagagctaggcataccacatttcctgacaactggaatagatgaccttcactcgtgtcagcttagaatacttttcaacttgcttctgagcatgcagggttagttagtatactctgtgcttattagaaatttatttcctgctaacgccagggtatcattttgataaagtttatttgcatttttcttatctgactatggcttttctcttagaatataatagttttgccaaagttccatgaaaagaatttaatgaactcttactgttttgtttatcttttgaagaataaccacctctgaagctgaatggtttaaaaagtcatgttttgccttttgtctaacctgtttccccaatgcattggatcggcaaaccccaaccctggtttctctgcaccacagtccactgctcagaccccgtgggtcgaggggcatacttgagggggttgtttcactaactgaaacttcagattcactgctgacctctttttacttggaaagccttggtgctgaggaactttagatcagattggcagaaaaatactcttgcaatagttttgtgtatgtgtgtgtatgtaagacttttagccatctgtgtaaaaacttccctgaaatgatctgattagcatttgtgatagaaaaggcataggtctgggtgtcagcgagtcctacctttgcatctacgatttagtagctcagtggccatgaagaagtacatttagtgtcctcatccagaaatattaaggaacatctcagaatgaacttaagatatttgatccaggtacttttggtgtttatttgctttaagaattggaactgaactaagagattgcttgagttcttgcccactgattaataatctgtggttcttttaaatgtgtctaaaagatattttgtgtaagaaatgcattttaatttcttgcaacagtgattcttttggcatatattctttaattttaaattatatgcaattaaatggaatttgagaaatagaggtatgtaaatttacttggatggtgtttggatctgttgtttaaaatattagatatttttgaaatttcagaaatgtgaatgcccacgtttaggcctagtaagagaagccttagatgtatctgatatgttttcttgttggacattaaaactgttaggggagttttatcattgtgacttacaagctgattgttatgctgcagtgagcaaatgtcaagagataaaattatttttgtctccttgcatggcaaaataactgtctaaaaaatgtcacataactttcaacttttcttttctcagattcatagtgaccttttaatagctcgtgagaaacagcacatgacgcagtgggaggatttcatgaccgagcagcacagcaagcaggcagaagtggacgaggagcacgggaaggccgtggagaagctgcgagcgcagtacgccgagatggagaagggcctggcgaggttctcagccttctgaggacgcgaaccacagcagtgacaaacgaacgagaagaaactgacatcccccgccccccccgaaacacctcccactaaaccatttagcctctgcttcaagcttagcaatatattcaatggcactcttctgtcggaaggcggagccctctcctggagtcttccctgtttcctagaggagtgccacctctttccagtttcaagtgcctctaaatgatcattcacaggggaaggagttggaggaaagcggtgtccacgtgctctcgggtagtgtggacccgtcttgctttccattgattgattatctcggataactaaccgtaagtacagacttcttagggaagcagtttaattcatccttctgcagggttaatattggtttatcggcttagaaggcagagatggtgtctgcctgtcgtggcctccttggctcttgaaggaatgtatacagtgttattccatgagtaatgtagacagaaacagctgacccgggagcagagatca

SEQ ID NO: 158 - DNA, 161812 bp, Hippotragus leucophaeus
  source 1..161812: mol_type = genomic DNA
tcttgtccaatcttctcttcgagtaaatccgacacacagaacaggtttaggactgagaagagaattaatcggagccatggaaacggccgagcggaggaaaagtgggagaggagggtgggcaggaggggtaggcaccctcccctgacgacggcgcgagggcgctccaaggatcacgtcacgcacctcaggtgacgtcacgaccgtgacacgcgggtgacgccgttgccgcggcgacttccagtcgtctccgccccctgcccccgcccctgccccccggcctagcgtccttcccccaatcccctcaggctcagctgcgccgggggccgcaggccggttcccgaggtggcccaggcgccgtcccaccgccgacgccgcccgggccgcccggcccgtccctccccgccgccccccgtcctccgcctccgcctccccccgccctccgcctcccttccccctccccgcccagcagcggtcgctcgggcccggctctcggttataagatggcggcgctgagcggcggcggcggcggcggcgcggagcagggccaggctctgttcaacggggacatggagcccgaggccggcgccgcggcctcttcggctgcggatcccgccattcccgaggaggtgagtgctggcgcacctgcgcccctccggtctcggggctcggctgactggtgtttattttgggggaaggaggtggcggtgggggctccggttgccctcagccaccttctcctcggggctctgcgggctgagagactggctttcctcacctgtccttccccgccaggcaggagctcgctacgtaaacacacacagtggcccaggggggtttccctggttcgcgctctgggcttgggggattcgggcagccgtggtggagcaggaggctatcaatagggggcgagactcgggggttggtccgagaaggtcacggctggctgaaggtagccagcctcgcatctcctggatgttttctttatttttggtggtggacgggtagcgggggagctggggccggcatcctggtgaaatacgtgggttagtagccggggccggcaccccagcccgagttaacgttgtctgtaattattacatggtcacggtgaagatgggcgcatcattctctctctaactctccccgactctgccccttttcaggccgctgccctccctccgcttctctacttgttagggcggaggggaggatttctcgtcacctgttttaaccagctaatggttttgatctagcctctactttttcaatcctcagtgccagtgtttccgttctttcttccatcccgacctcagacccccagttcctaatgtttgcagtgtcgctagctggtaacccccatcgcaattccacctgcctccccgctccttagccagtggtcggacctgtctgctcctaacctcagcttctacttacgacgattttttgcccctctcttgtcttagtcttgttgaggccctctacttcattcccccgctccgtaacatgttatggttacaaatccttctggacactttggaactacttactttctgaatcctgaagctgtcaagattccgtcagatttcacttgctttcctggcaccttttagtccatcatccattgtgcacccacatctctttgtttattcctacctgtggtttttaaataggtgtgattgatttctttctgtcctattttttttcttttactttttcttctttagcccttccatctctcagccactgtttattttagtctcttatcaccttgtcagattactttctttacattttgggttttattatgtaaaatgtattacataaaataatacactttattatgctttccaaataatgagataatgtatggtatgataactgtgctttataattactgattagataatgtgatttaacgccattgactttgctcaaagttctttccttcgtactacagcacttacattttatttcccagttctcataacatctcattctttcttctgtctatgcagttctctttttcctgcttcatcatctttactttgagattcatcccatatgcttactctattcagtatcagtttgttcacaatactgtttttcattctctcacaccacttgcatctgtgcctaagatgcattctgtacatctcatcttaaattctcatttgtatatatctataaatatatattataaaaaataatgggcatgggttatgaactgtaattttctgattgtaacattgtttttgttgagaactttgtttccgaattatataaatggctctatatagatatacgtgatgtgtatatatatatatatgtgtgtgtgtgtgtcctttacaccacttcccacttacttttctgtttgcatttctgctcagatcagtttcctctaatatctgttcatttcctctagtttcttgaattttaaggatagtggtcatcccttcttccatttcctagttcattctgttttccttgtccccaattgccattcattctgctttgtttcctggcttttggtacttaacttgctgaggcttcctcttgtcttccccacacctccacattccttcttatttataaacaactttgttccgttgacatggaaatttatttttagaatacattgtttttaatggataaatacttggggtcacatctgctgtctattttttccatgaatcggatatgcctttgtcttactcctcacaggtgcctctaggcttgctttactttgtagagcttgtgtggttttgttgacttgcatcccgaagaatggtaagattcatggagcttccctggtggctcagatgttaaagaatctgtatgcaatgcaggagacctgggttcaatccttgggtcgggagggtcccctggagaagggaatggccacccactccggtgttcttgcctggagaatcccatggacagaacctggcaggctacaatccatgaggtcacagagacagaccagcctgagtgactgacactttctctttctatgaaattgtatttctgattgtaacattattttcattgagaactttgtttcaaaattattagaacagtttgcagtgatacagagaaattttttgttaagtacagtgtctgctattttatttgaaagggccagattgtttgagctctactctgaagattctgactcagtaggtgagagctagggccatcagcttctgtatttggcacatttcctaggcagttctcatgtgccagtacttgagaacttctaggttagatgaattcaagtttaaattggtaataattggaaaagatattagtatctcttgaaaccataagtatactcttaactaattttcagtagaagtgtttcctcctgcctcctccacccaagtttttatggctagtgatgaatagtagtttttcctccatattttcttataagagcttataataaatgtatttgactgggggagaggagagtaacgggttaaaaatgaatctcttttcaatataaatatcagtgttatggatgatagaataaattcctccaaaaaataattttaaatttgaagttggtttactgtcatcttttaaactgtcttccttatatgcacttaaggagataatgttatgattgtcaaatacatagaacgaaatgaaaaaaagtgtctattaaagaattaccttacttgacagtaaaatacagatttttaaaaagtttctcagaggaaaaacacatttattattcaaaaattagaaaaatataagtgaaaaattttggaaatttatctgtaatcttgccactaagatataattactataaagcattttagtgtatatacatacactcttttttatgcttgcataatataatgtatgtggttttgtaatatttttaaacagcatcataaaagatttaacacagtgtgattttaacaatttttatatttttaatttaaaaaattttgctgtcagacatcttgaacatagaatgtagatttagttttttaaattatgttggtaagtgaacaaatttcatgtcctgtatttttaagtatcactttgtagaagctcaaaatagaatattctaataaatgacaggagctcattaaatatttatcaaataaatatgcttttacttttggcattaaacatttacttctgaccatttatatttccctgatgttactttctttctgtgaccatatggtatagtatgggacattacgacaatatggtataaaaattttttttttaatgtgttatgccagggtatgatatttattaaccattcctcttacggtgtatttttgtagaaaggagcctcttacaatcacattacaattaaaattgtattgttttcaagatctgttatcactaaccttggttaaactgtgtaattataataatgcattgactaagtagtattctgggatagtatgtcctttataatgaggttaagtgtgttaaaatacatttttatgaatcatgccaaaccaggttgaattgcatcatacttttaaaaagtggtaggcctgctaaactttgtgtttctacagttctgattattgctgtatgaacttgttaagatacatttcaaagtagacaaaacatgcctgtttgttaaaaccataaaataactgtgtgtctttggtgtttttagcattccctttctgtagtctttcttatcatttaatgaacgccctcctttaggcgccactcacctcttcttttatttagaaattttctgacacctgtcacttatgtatgctgactattaaaggaattgatagtaaatggacaagaaagaaactttggaactgagtactcaaatccctgaatgtagtaaaacctgaaagcaacttgatttaattgtgtttagataataggctagacaaattatattaagactataggctagagaagtctgatttattttgattccctgtttctggctttactgtagagggagccgatcaggtcataacaaatggaaatctacgctctgtgagtgctagggaggaaagggagggagctttgtttgcatttgtatactgctttgttagcgttttctaagacctgatgcttaccttgttgaagaatgaggcatttatttagtgttcttttttctccaaccataaagctctttttctcctttagaaatgcgaaagtgcattttcccccttgacatcttgatattaatttagctggtacttagtgaacattttgtgccatcttcctcttttatgaaattcagtatgttcctgtgctttctaaatttctgcctcaaattgtcattcagataaacctttagagtcagtggcttttactgaatttttcttcctcagaagttgaattgttttgagtccttttactcattctctttgtctagttcgtctgaattggttattctgtaaagtcaggatcagcaatagctatacagcctctgaattcaaaatggatgagcctgttgaggagcttttctgttttgtaaacaatgcttgcatggtcataacgttgtagataagaaccaaaaatctagccgtatttcttctattcctgccttaaatatttggtggaggcattgacatattctgggaagtggtttttatttttcagttttcttttgtctgccataatttactgtcacataattagcacaatagtcagaaaaaactctttaatacagcctctactctaacattaagcaattatttttttctcccctctatcctctgagattattttggtttccatgatttctcttgggtttaaaaaactgttattcttgtttctccccatatcaggactgcgcttatagaggcaaagtgatgctcagtaacattacatttctttctgggttctgggaatgcccttgataaagaatataaaaattgctctgaactcagttaactttatatcttctggaagctctgtaacatgaaatgaaacatcatttttattcttgtaatatagctgcaattattgacagcactttggggacaaatatgccataagattgtggttttccaattactatagagctctagtactgtttttaaaaacacattagcgctgtaaggagtatagatttttgagttgctctaatatccatatacatgaagcaatttttgcctgttttgtacatttttttatcctcatctggcacataggtactcagatatttagtgaaagaattggctaatgtgtacaaaacagggaatatagccagtatcttatagtaactttaaatggaatacaatctgtaaaatttttgcgttattgcgttgtatacctaaaactaatataatagtgtaaatcaactatacctcagttaaaaaaagatttttttaaagaattggtgaatgaaaccctattagatatggtgcacttggattttctgtaccattcagttctctttttttttaatgctactcataaaatcagtttattagattgacaaccacctggttggaacaatttgttttgagggtatcaaggactttctacagagcttacctcaaggctctatttagtcccactataccttaactgttgaaattcttcatttatctgcattaggcattgatctccttgaaaggaaaggagttgatggctgtaaaaattttagagctactgttcatggaagagagatttgtactgacatgaatcttcccaagtgtagtaatctgtgtagaagattttcagcaacttgtgtttaaggcagcaatcaactgacttctttgtaaagggtcaagtgataaataatttaggcactgtgtttctaactgctctgtctctgttacaaggactgaacactcaatgattggtattgtagcataaactcagctaatagactatgtaaatgaataagtgtgactgtgttccaatgaaacttatttatggacactgaaatttgaatgtgtcatgaaatattttcttttttttttcattgaaaaatgtaaaaacattcttggcttgtgagctgtacaaaatatagctggggtggggggcagatttagttcatgggccaaagttttttacttagtctaatggagactaagtagatcatatttgaggttctgaagttaaggtgtgatataaagttctgtaagtttttaaaagtcaggtttattgggttataattcacacatactataatgtaccattttaaacacacaacttgataagttttgacaaatgtgtatagtcatgtaactactgccacaatcaagataaagaacatttccaccaaaagttccctaattcctcttttcattcattttcctcgctacactactgccagtcctgacaaacactgagctgacttccagctttgccttttccaaagtcataaatggggaatcatacagtgtgtgttaccgtgtatttggcatctttcatttagtttttttttttaagttgaatttttttttcctctaacttaagccgcttagaagttttcagtattttgtttttatattttatgtatgtatttaagtttttgactgcttcaggtcttagatgcggcatgcaggatcttcattgcaatgtgggactctagttctggtgtgtgagctctagagtgctgcacgctcagtagctgcagcacatgggctaagttgccgtggaccagggattgaaccgatgttccctgcattacaaggtgatttcttaaccattggaccaccagggaagtccctagtttggtatttttgagattcgctcatgttgttggcatgcatcagtaattggtttctgtttattgcttagtggtagcatatggatgttgcacatttaccagttgatgggtagcagggttctttctagtttttagcagttataaataaggttgccaaaaatgttgggttcaggtttttgtgtggacgctgggttttttatttctctagtaaggagctagaacttggattcatgggtcatatggtaggtatatacttaattttatacgaagctgtcaaactttttttttttttttgaagcaaggaatacaactttatttggaaagctaggtgtcctagaagatggcaggctagtgccccagcgtatcatcttatctaggtctgaatgccagtttcttttatagacagaagagtaggaggtgaggaaagtgaaagcgaaagtgacgtcgctcagtcatgtccgactctttgcgattccatggactgtagcctaccaggctcctctgtccatgggattttccaggcaagggtactggagtgggctgccatttccttctcctgtcaaacttttctaaagcaatagtaccattttgcattgccactcacaatgaatgagagttccaaactttatcctgtcaacacttggattattagtcttgttagttttagcagttctaatatgtatgcagtagtagctcgttgtggttttaatttgcattttcctaatgattaatatatttgacatctgtttatatgcttagttccattcagttcagttgctcagtcgtgtccgactctttgtgaccccatggactgcattatgccaggcctccctgtccatcacagagtttacgcaaactcgtgtccattgagtcagtgatgccatccaaccatctcatcatctgtcatccgcttctcctcctgccctcaatcattccaagcatcagggtcttttcagctcatatgatgagtcagctcttcatatcaggtggccgaagtattagagtttcagcttcaacatcaatccttcccaagaacacccaggactgatctcctttaggatggactggttggatctccttgcagtccaagggactctcaagagtcttctccaacaccacagttcgaaagcatcaattctttggcactcagctttctttatagtaaaagtctcacacccatacatgactgctggaacaaccatagccttgactggatggacctttgttggcaaagtaatatctctgctttttaatatgctttctaggttggtcataacttttcttccagggagtaagcctcttttaatttcatgactgcagtcaccatctgcagtgattttggagaccccaaaataaagtctgtcactgtttcctctgtttccccatctgtttgccatgaagtgttgggaccggatgccatgattttagttttctgaatgttgagctttaagccaacttttcactctcctctttcacttttatcaagtgactcttaagttctttgctttctgccataagagtggtgtcatctgcgtatctgaggttattggtatttctcccggcaatcttgattccagtttgtgcttcatccagcctagcgtttctcatgatgtgtactctgcatatgagttaaataagcagggtgacaatatacagccttgacataatctttttcctatttggaaccagtctgttgttccatgtccagttctaactgttgcttcctgacctgcatacagatttctcaagaggcaggtcaggtggtctggtattcccatctctttcagaattttccacagtttattgtgatccacacagtcaaaggctttggcatagtcaataaagcagaaatagatgtttttctggaactctagtgctttttctgtgatatgacggatgttggcagtttgatctctggttcttctgccttttctaaatacagcttgaacatctggaagttcatggttcatgtattattgaagcctggcttggagaattttgagcattactttactagtgtgtgagaagaatgcagttgtgtggtagtttgagcattctttggcattgcctttctttgggattggagtgaaaactgacgttttccagtcctgtggccactgctgagttttccaaatttgctggcatattgagtgcagcactttcacagcatcatctttcaggatttgaaatagctcaactggaattccatcacctccactagctttgttcatagtgatgcttcctaaggcccacttgacttcacattccaagatgtctggctctagtgagtgatcacaccatcatgattatctgggtcgtgaagatcgtttttgtacagttcttctgtgtattcttgccacctcttcttaatatcttttgcttctgttagatccataccgtttctatcctttattgaacccatctttgcatgaaatgtccccttggtatctctaattttcttgaagagatctctagtctttcccattctattatttttctctgtttctttgcattgatcactgaggaaggctttcttatctctctttgttattcttgggaactctgcattcaaatggatctttccttttctcctttgctttttgcttctcttttctcagctatttgtaaggcctcctcagacagccattttgcttttttgcatttctttttcttggggatgttcttgatccctttcttctgtacaatgtcacaaacctccgagcatagttcatcaggcactctgtctatcacctctagtcccttaaatctgtttctcattcacttactcatatattatctttggtaaagtagccattcagatcttttaatgtagtatttaccttcttactatggagttgtaagaatgttgtatacgtaacctgaatacaggttctttgttttcagacatgtgttttgtatgactcccagtctgtggcttgtcttttcattttcctaaatgttctttgaagagtagaaattttgtttttgatgaaataaaatttatcaatttttcctttttgtgtttcatgcattctgtgtcctacccagtatatatttgctcaacttaacgccataaaattttcttccatgttttcttctgtaagttttacagtttaagcttttacatttcggtctgtgatccttttggagttaatttttctatatactgtgaagtaagggtaaagtttggtcattcattttcatatggatgtccagtttttcaccttccttaaagagactaacctttttctgttgaattaccttggcacctctatttaagtcagttgattgtgtttgagttttatactctgttttattgacctatatgtctcttctttgcctggtaccacactgtcttgattactctagctttatagttcagtcttaaaattagttagatccagtttgttggatttttagaactttaaaatttgatttttaaaattcttttgtgctgttgtattttttgacagcacaggattcgtaattttctcccagttctcaaaggtgtcttctatccaagaaaagtttaaacttactgtagtatatagttaatacatcccttccttgatttatttggtggagagattgtgaaaagtggcagatacagaaaacgtgtttcatccaaaattaacttcgtaagaaatgacaaaaatatcctagtagatggcaccagaaggtcaacaatgtgccctttttttttttacctacatttcaaaaatattaactctataatctagatatgtatgggtgaaagtgaatatgttaagttgttttttcaccaaaaagttatggaaaatgtcaatcaggtggtgggagttacgagtttataatactagctgtgttattctccatcttcactgtgagtttttccatttgaaatctatgtcatgttctgtgatgttccagaattagcacccttattactcttagagttatcattaaattgtttttactaaggataagcatatagtggtggttggtcatatttcttcctttttcattgggacccataggacctattaccttgtttgaaattacaatggtggtagctttttattccatagcctgaagggcttccctgcaatgtaaaatgatagttgtagtcatgattttcacttaagaattatgaatacattacctgatttttttttcttagtttccttgtgaaggaaggaaaacttaagacttaaccatcagtgaaagtcatggaataccttagtacagggtcatgtgacaattgggaggatagactgttcaggcttctgttcatgttgtaagttcagtttggttcagctgctcagtcgtgtccgactctttgttaccccgtgaactgcagcacgccaggcctccctgtccattaccaactcccggagtttatgcaaactcatgtccattgagtcagtgatgccatccaaccatctcatcctctgtcatccccttttcctcctgcccccaatccctcccagcatcagagtcttttccagtaagtcaactcttcgcatgaggtggccaaaatattggagtttcagcttcaacatcagtccttccaatgaacacccaggactgatctcctttaggatggactggttggatctccttgcagtccaagggaccctcaagagtcttctccaacaccacacttcaaaagcatcgattcttcggcactcagctttcttcatagtccaactctcacatccatacatgactactggaaaaaccatagccttgactagacggacctttgttggcaaagtaatgtctctgcttttgaatatgctatctaggttggtcataactttccttccaaggagtaagtgtcttttaatttcatggctgcaatcaccatctgcagtgattttggagccccccaaaataaagtctgacactgtttccactgtttccccatctatttgccatgaagtgatgggaccagatgccatgatcttagttttctgaatgttgagctttaagccaactttttcactctcctctttcactttcatcaagaggctctttagtagtaagtagtatctggctatttgcaaattttgaaatggcacttacaggaagagagaaccacaacatttttggagactatcttcaactgttgttccaaaatcaatgtgttttaaaaaagtatgcatctccttattgtaaaaagatgccttgtgtttaaattgagaaatattctacttttgttttatatttttcttttactaaatatataacctttaaagtaataacaccagaaaaatttggctgtatttccagaatggctaataaattttaggatgctttgaattagtcacttacctttgattatttgaaacagtttaaaatacagcttgggggttattcctctgttgatctaagatttttatactgtatttgctgcattacagcacttactttgcaaagtaaatttctgtttgtatttatagatgtgctttattaaaggagtttactagctccagcagtgatattgtaaatagttattaaaacttctgttttatttttttcccacgttgggtctaatcccattttgtctgttttaaagtttgtactctacctagaaatctctccgaagcatagagggaaaaaaacccagcagttactaatttgagagttttgtttttaaagagttcttaatagcataatttctggtaatgtatgaaggtaatttaatttccatttattatttagaaaaaaaatgctaccttttccgtgagtcccaaacaattactgcctttctaacttttttttttactatgaaaagataaagaactattgttaattattcctacataactcagaattaattttttacacatcacattactaaatttccatgggaatagtgtcagagagtttgagcaaactctgggagataatgagagccagggaatccggacgttttgcagttcatggggtcacagagagttggacatgattgagcgactgcacaataacaggtgtcagagaacttcagatggggaagactttatgatttagtatagtccttacattcctattctgcaactactgaaagtcttcatcttagtttttacatgcttgcttctaaaatgtgaaatgttttacccatatattgtatattatttccacatgtcttctcaaattaagagtaaattacacaatctaaaagtttcattatgcataaagatttagtgcagtgtaacattttggtaagtttgttgcagatgatttttctactactgaatttggcacttcagttgctatatgtatttagcaatcaaacttttagttattggttatcataaatgggtactcgagagaaaagtttaatcatgaagtcataacaattcagtgtcatagccattcatacactgcttggttttcactggcaattcttgatccctgtcctgcccttcctcatgctatgtactgaacttgtaagtggataacaggggtggcatgaggatacatacaagccttcacagaattatagttgtgttatttttctgccaatttttgggacaaagataaatatattcgaaattttgctttcagatatctttatggcgtttttaaagaatgtccagtgacatactttagcacagggctctagttgtcaaaaacttttggttagttcttaatgtaggactgatgattgacctagtagaactgtttcagtgttgccaacattccattaatgttatctttaaaccactattgaattaaggaaatttaaaatggcagcattggtattttgggtaaacatttcttaggaatgaggtaacttctctgtatgatagtagaaagactgtatctcatggctttataggaaaaatggtaagcattaggacttgtgttttggcatttttaaagctattgtccaccatttgctttgtcatccttccaaaactccactgataaattttgtattgagtcatttcacaggacaataggtatttatgtattcaataaatatttgaatttctactgtgccaggtagtaatctagctgcttagtacatttaaaaccaaaacaatgcaaagatctctccttatctagcttacattctggtgtagggggtgtgtgtgtgtatgagagagagacacacacacactcataaaaaaaattttatagtgtgtttgaaggtagtaagtactatggaaaaatgaaagagcgggtgaagtttgggggttaggtagcaatttaaaatagatgtaggtaggaccttgtctgaaaagggtgacatttgagcaaagattttaggagggcagagaaaaacgtatcagaagaaccaagatcaaaggttctgagccagggatgtaccttgcctgtttaaaaaacagcaaggatgccagagctgctgaagtgccttgaggaagggaggtgaatagtaggatgaaatccaagaggtgtaatccaagaggtgttgaagcagcagtgggagcatgaccacaggccacgtgaggagtttgacttttaagtgaaataagcagcagtccagagctgagagctatgatctgacgtctgtggaaataggaatactctgatggctgtgggggcaataggttgtaaagggcaaggatggacacaagggagccagcgaggagcctcttccagtcctttaaggcagtggcttaccagatgggtagcagtagaggtcttgggaagtggtcagagtttggacattttgaaagtagagctgacagaatttgttgatagattgaaggtgagatgtgcaagaaaggtgtcatggggaaggggagggttcaggttaagaattcagttttaaggatgttaagtttgaaatacctattagatgtccaaaatgttgagaaagcagttggtacatgagtctggaatttgagagtgaggtccagtggcagagactgttcaccatatctatgtcttattttgagtataaagctagacaattctcccttgtagttcgctgtgatcatgtggttaagctcaggctaaactatggtttttccagtggtcatgtatggttgtgagagttggactgtgaagaaagctgagcaccgaagaattgatgttttgaactgtggtgttggagaagactcttgagagtccctttgactgcaaggagatccaaccagtccatcctaaaggagatcagtcctgggtgttcattggtaggactgatgttgaagctgaaactccaatattttggccacctcatgcgaagagctgactcattggaaaagactgatgctgggagggattgggggcaggagaaggggacgaccgaggatgagatggctggatggcatcaccgacttgatggacgtgagtttgagtgaactccgggagttggtgacggacagggaggcgtggcgtgctgcgattcatggggtcggcaaagagtcggacacaactgagtgactgaactgaactgaatgtaatatgagcacaagtgatgtgcacacattttaggtctaggccataccaccgtcttccatctggtttttcccttctggtctgctggaacagaggtgatctttaaggaaagttgtaagccatttgttgtaaatggtagattgtccatcagtctagataagaaccatcttgccaacctgtttagccacctagtactattagatgagtaagcaataaatttaatgagtttgagtccttatacctttaagatgtatttgttgtaacagctaactttaaatttgggtattgaggtgtttttgtttttttagagtcagtgtcactgcttactcatcctaggagctttattattccacaaatcttattttcactttgtatctgattttttttttttaaatcaagacatttccctccatgactaacccacttcaccgctcagccagagaatccatttcaatgttcactaaattacattaaaattttttttcttacatcaaattagttttattttctctcttaatttttactgggggcttccttagtggcttggatggtaaagaatctgcctgcaatgcaggagacccaagctcgatccctgggttgggaagatctcctggagaagggaatggtaacacactccagtattcttgcctgaagaatcccacggacagagagcctggtgggctacagtccatctggtcgcaaagagttggacgcgactgagtgactaacttactcacttatagttgctctacagtgttgtgttagtttctgctgtgcagcaaagtgaatcagttatgtgtttacctagattcactcttttttagatttccttcccatttaggtcaccacagagcactaagtagagttccctgtgctgcacagtagggtctcatttgttcttcatcgttcagtcgctaagttgtgtccgacactttgcaaccccgtggactccagcacatcaggcttccctgtcctttcccatctcctggggtttgcttaaactcatgtccatggagtctgtaataccatccaaccatctcatcctctgttgcccccttttccctcctgccctcagtctttcccagcatcagggtcttttccaatgaggcagctcttcgcatcacatggccaaagtattggagcttcagcttcagaatcagtctttccaatgaatattcaagagttgatttcctttaggattgactggtttgatctccatgctgtccaaggggctctcaagagtcttctccaacaccacagttcaaaaggatcaattcttcagtgcttagccttctttgtggtccaactctcacactcatacatgactactggaaaaaccatagctttgattagatggacctttgtcagcagagtaatgtctctgctttttaatatgctgtctagcttagtcataacttttcttccaaggagcaagcatcttttaatttcatggcggcaatcaccatctgcagtaattttggatcccaggaaaataaaatctgccactgtttccactttttccccatctatatgccatgaaattatgggaccagataccatgatcttagtttttagaatgctgagtttctagtcagctttttttattctccttgttcactttcatcaagaggctctttagttcctcttcagtttctgccattagagtgttatcatctgcatggctgaggttattgatatttctcctggcaatcttgattccagcttatgtttcatcagcctggcatttcccatgatgtactctgcatagaagttaagtaagcaaggtgacagtatacagccttgatgtactccttttccaattttgaaccagtctgttgttctacgtctggttctaaccattgcttcttgacctgcaacaggtttctcagaagacaggtcaggtggtctggtattcccatctctttcagaattttccacagtttgttgtgatccacacaaaggttttatcatagtgaagcaggaggtgtttttctggaattctcttgctttctctgtgatccagcaaatgttggcaatttgatctctggttcctctgcctctgcaaaatccaactggtacatctggaagttcttatttcacatgctgctgaagcctagcttgaaggattttgaccatttcctctctagcatgtgaaatgagtgtggttgtatggtagttggaatattctttggcattacctttctctggtattggaatgagaactaaccttttcctgtcctgtggccactgctgagttttccaaatttgctgacatattgagtgcagcactttaacagcatcattttttttagaattttgaatagctgaaattccattgcctccactaactttgttcatagtaatgcttcctaaggcccacttgacttcatatttcagaatgtccagctctaagtgagtgacagcaccattgtgcttatctgggttattaagaccttttttgtatggttcttctatgtattcttgccgcctctttttaatctcttctgcttctgttaggtccatactgtttctttcttttattgtgtccatctttgcatgaaatagtcctttggtatctccaattttgttgaagagatctctagtctttcccattctattgttttcctccagttctttgcactgttgactttagaagcccttcttttctctctttgctattctctggaattctgcattcagttggatatatctttccctttctcccttgccttttgcttctcttttttcagctatttgtaaggtctcctcatttatttttctttgggatggttttggtctctgcctcctgtacaatgttatgaacctccatccatagttcttcgggcactctgtctaccagatctaatcccttgaatctatttgtcagctactgtataatcctaagggatttgatttaggtcatacctgaacagcctagtggttttccctctttcctcagtttaagctggaattttgcaataaggagcttatgatctgagccacagttagctccaggtcttgttttcgctgactgtgtagagtttcttcatgtttggccacaaagaatataatcagtctggtttcaattgatcatctagtggtgtccgtgtgtaaagtcgtctcttgtgttgttggaaaagggtgtttgctatgctcagtgtgttctcttggcaaaactctgttagtctttgccctgctacattctgtactcccaaagccaaacttgcttgttactccaggtatcgcttgacttcctacttttgcattccagtctcctgtgatgaaaaggacctccttttttggtgttagttctagaaggtcttgtaagtctgcataaaaccatttaacttcagcttctttgatatcagtggttggggcatagacttggattactgtgatattgagtgatttgtcttggaaatgaacagagattattctgtcgtttttgagatgcacccaagtactgtatttcgtactcttgttgactgtgaggctactccatttcttctatgggattcttgcccaccatagtaggtacaatggtcctctaaattaagtttgcctattcccatccagtgtagttcacaaattcctaaaatgtcagtattcattcttgttgtctcctgcttgaccatatccagtttatcttgattcatggacctaacagtccagattcctgtgcagtattgttcttttttttttttttaatcatacttttttttaaattttttttttactttattttactttacaatactgtattggttttgccatacattgacatgaatccgccacaggtgtacatgagttcccaatcttgaacccccctcccacgtcccaccccgtatcatctctctggatcatccccgtgtgcagtattgttctttagagcatcgaacttcactgttaccaccagtcacatccgcatcttatacacagcagtgcatatatatcagtcccagtctctgagttcatcccactcactcttccctccttggtaaccatacattcgttctctactctgtgactctgtttctgctttacagataaattaatctgtaccatttttctagattccacatataagcaatgttatatgatacttgtttttctctttctgacttacttcactctgtatggcagtccctcggtccatccacatctctccaaatggcactgtttattcctttttatgacttatattccattgtatagatatgtgccacatctttatccattcctctgtcgatggacatttaggttgcttccatgtcttagctattggaaatagtgctgcagttcagttcagtcgctcagtcgtgtccaactctttgcgaccccatgaatttcagcacgccaggcctccctgtccatcaccaactcccggagttcactcagactcacgtctatcgagtcagtgatgccatccccccatctcatcctctgtcgtccccttctcctcctgcccccaatccctcccagcatcagagtcttttccagtgagtcaactcttcgcatgaggtggccaaagtgctggagtttcagcttcagcatcattccttccaaagaaatcccagggctgatctccttcagaatggactggttggatctccttgcagtccaagggactctcaagagtcttctccaataccacagttcaaaagcatcaattcttcggtgctcagctttcttcacagtccaactctcacatccatacatgaccacaggaaaaaccatagctttgactagacagacctttgttggcaatagtgctgcagtgaacatcaaatgcatgcatcccttcgaattctggtttctctggatatatcctaggagtgaaattcctggatcatgtggtagctctatttttagtttgttaaggaacctccgtactgttctccataatggctgaaccaatttacattcccaccagcagtgtaggaggggtccttttttcccacaccttctctagcatttattgtttgtaaatcttttgatgatggccattctaaccagtgatacctcattgtagttttgatttgcatttctctaataattagtgatattgagcatcttttcatgtatttgttggacatctgttatgtcttctttggagaaatatctatttgggttttctcatttttgattgtgttgccttgtttttttgatattgagctgcatgagctgtttgtatatttattgttgtttatatttattgttgttaagtcatgtccaactcttttgcaatcccatgacctgcagcctgccaggcttctctctccatgggattttctaagcaagaatactggagtgggttgtcatttccttctcttggggatcttcccaacgcaaggactgaacccacatctcctgcattgcagttggagtctttacctttgagccacgagggaagcccgtttgtatattaggtggtttataaagctgtgaggttgatatggtcatcaagggaatgagcatagataggcaaaagaagagctccaaggtcagagaaaagaggaggaacttgaggagcaactagtgaggtagaaaattaaatgaagaaagtttattagcagagagagtggtcatttgtgtatgctgctatgttaagtaagataaagactaaggattttccactcgagttaaggaatggatggtattgatgatttatataagaagatgctgagggagatactgtggttgagtgagtttaagagagaataggaggagatgtgaagatagtgaagacttttcctacaaagggaaaagagaaatgggaccatagctagtgaaggagttggggtcatgagatttttttaatgatgaaaaggtaagggcatataatgaaagaatgaaccattatggtgtaagacgttaatgatttcaggggagacagaagaattgctggagcagtgtctgaacaggccatagggaggggggtttggcacacaagtggccggactggctcccggtaggagcatagggactttgtctttgatagtaagtgtagggcagagtatgtggagtagcagtgctgatgggcagatcgatatgatgctgggaatctgtgcatgttgtcttccagttgcctcattttttcccagtgaagacaaactgaaggttatcagctaagataccttggggttttggtgttttggggatgtggcgttttaaggagaaaggtaaagacgttaaaggttgttgggagtgtgtgagagtgaagagaccaggaagagtgaatcgatagacgatatcaggttctttccctgaagacggagacggcagcccactcaggtactcttgcttggagagcccatggacagaggagtgctgcaggctgcagtccacgggatcgcacaggcggacacgactgtgcgcctatgttcacttcagttcattaggttattttacttagtattttacttgctgttgtccagacagcattgtgggcctcctaacttgtcctcagatcaaagttcaatgtaacttgccaaggcaatttaataattgatatgagtcattctcattttaactcacaatcattgggaaatagaacatgaattattacttcttcatgaagtatttgccattatcctgctatgaaagctaaatttggagagatctggttactaattttctttttaaaagtaattatttattgaaaaaattttgaatattgtttttttctttgtggaatagtatcccagctattgcaatctaatttttatactgtactgtgaagcaattgctatcctgttattttattctaagaaccctccaaatttgacctgtctttacctgtgcgtttcctcttgcctgaaatacagattccctctcttaaacccatcccccaaacctttcaaacttagttcacttattgttggaagccttccttatcctctttccaaggcctagttaggtgcatctactttgtgctcttgtagcatcccgaagtacatctgtatcattctacttactgtattgtgttactgggtttttgttgttatgtgtctgcttcctttagaccagcactgttcagtcaagatagctgtcatgatcgaaatgttccctgatgtccaatatgtccacatgcagctattgtgtactcagaatatgtatagtaggacccagtactggcttttacattttcatttaatttaaatttaaatagtcaacacttggctgtggctaccttggtcggttctgctgctgctgctgctgctgctgctgctaagttgctgcagttatgtctgactctgtgcgaccccatagatggcagcccaccaggctccgccgtccctgtgattctccaggcaagaacactggagtgggttgccattgccttctccatggtcagttctagaccttttaaaagtcaaggttcacttatttaaaagatagatccacagacatagaaaacaaacttctggttaccaaagggaaaaagagagagggggagggagggaggaataaattaggagtttgggattaatagatacacactattgtatatgaaatagataagcgaggacctgctgtacagcacagggaaccatattcaatatcttgtaataacccataatggaaaataatctggagaagtatatacgtatgtatacataactgaatcactttgttgtatccttgaaagtaacacagctatacttcagtaatatagtcaaggctcgtgtggacattattagcctataataagaggctaataaggtcttgatggaagttaatgtttaacctaggcaagtagaaggaaggaaaagggctgtaataggcagcgggaatagaatttgaaaaaaattggacttggaaattcataaggtagtttatttaaagaacagaatagtctgtagttaagtgaattgtaggaagtaaaatgtggctaaattagatgctgctggattgtggaaaataatgatagactgaaaaaaaattttaactttgtattatatgagtgggatgaaactggagatttaaaataaaaaattataaaagttatattccagggtgattgaattggtgagtgtttgtagggtagaatcaagatggaaagaggtcaaacaacaaaaaatgtttatagaaagacttggtagtcaggtgtcacactaggccacagttggaggttgggttctttgaaagcagatactgagacattttttgcaatgcaagattttattagaaatcaatacttgcaagaggaagaggctctgtgtgggactgagcagagcaaaaagttctctcatcaaagtattgtgatataagcctcagaaaacctttacctattagcggctctggagtgagagattgtctatcagagagacccatattaagccaagatggctgggcctttgtttggtctctaatccgggcagcagttgtggtggaccttggaggatggggcatttggaggctgtctgctgactatactcacaactgggccagcagttccttccatgaagaaaagcttggtgttgcatccctgtgtctgctacagccagacagtctgtgtgtgggcagtccttccctagaggaaatgttctgaatacttgaaggtgttttgctttttagcaaggtgggggaacagggcacttactagtattcagtgagcaaggaccagggaagtcagccttcccacagcgttcaggacagtctgcatattttcaaattgtttggataatcacgtggtttagaatgagttgctagattttgaggtaggagaaaaaagtgatcataatgaccagagcttagaaactaactttgttttacgtatgagtcattattttcatagagtacactagaagtttcaggaatttatcacataaattggagaaatatcaaaagttttcaatcagacctttgtcaagagttgtttaccacttcggaaaatcacataaattatggcagtgccacttgtatagtattgatgactcagatcctcttctcctcagtctgcagttgtaaccaccacagtcacagtgattctgcatatagatgcgagcacctgatggccctattatgttgtttattacagtaatgctttcacattttgaaatcaatattttgttataacttaatttctttcatttgattgaaagtacaattagggtattatattgactttttaaattgtgcttatgtaggttatctctaaatttcaagaagtagtacaaaatagttttcataaaggggggaaatagatttgttttcagtaatggtagattaggttattcagataaacttttgatgaagacaactaaaaatctttgaaacattattttaaaaaatcttaatgaatgaagagctgaaaagagcattgtgtgtgtgtgcacagtcactcagtcatgtctgactctgtgtaaccctgtggactgtagcccacctggctcctctatccatggagttttccaggcaggaatactggagcagattcccattttctactccagggaatcttcccaacccagggatcaaacccacgtctcctgcattggcaagcagattctttaccactgtgccacctggaaagcccaatagagacttgccagaccaaaagcaaaaactcaaagaaaaaagaaggtaatgaagtagcttttgccctaggggcagttgccagtctgtttgaagttgggctttggttttggtggacgtcatgggggtgaagaggacagaagtcaagacctagagttcatccaagctgagagtcaaaaaggagaacgactccattgaggatggtacttcaataattttatcattaggtaaaaggtgaaagaaaactgtctgcctattccaatatcaggggaattgtagggttgattggagtagggcaagaaaaaggaaattaattaaactcttcaagtcttgaccatagttttagacctcacactgattgacgtttacatttgtcctgctagggtgatccaggtcccctttaatcatggctcttattttgactggttgtgctcccaaggtctggcagaaggaaaggcaaatcttctgtaggacagagtcttcttcactctgagggaattgccaatagcagttttccaaggacagagaaagcagtacattgtcataagtaaccaggcatatttgaaaaaactaggcaaaattacatgatgtatgtatgtatgtatgtattcagttcagttcagtcgctcagtcgtgtccgactcttcgcgaccctatatattaggttgatgcaaaaagtaattgcggtttttgcactattgaaatttgctgtttgatactggaatacattccaaataaatgtggttaagttatatatcattttaatgtgcacttctcgctttgtgtttttttgctaatgacttattacttgctgtttatttaattttttttgactatagaaatgatgttagacaaaaaacaaattcaagcagttttttaatttgagttcaaaatagcttgaaaacagcagaaacagtttgcaacatcaacaatgcatttgacccaggaactactaacagaggtacagtgcagtggtcattcaagaagttttgcaaaggagacaagagccttgaagatgaggagcatagtggccagccatcagaagttgacaacaaccaattgagagccatcattgaagctgatcctcttaaaactacaggagaggttgccaaagaactcaacgttgaccattctgtgagttcagcatttgaagcaaattagaaaggtgaaaaagctcgataagtgggtgcctcatgagctgaccacaaattaaaaaaaatcattgaagtgtcatcttctcttattgaactcaagaacaatgcaccatttcttgaccggattgtgacttgcaatgaaaactggattttatatgacaactggtgatgactagttcagtggttggaccaagaagctccaaagcacttccctcccaaagccaaagccaaaaaggtcatggttactgtttggtggtctgcttctggtctgatccactacagctttctgaatcctggcgaaaccgttacatctgagaagtagtatactgagcgattcagtgagacacaccaaaaactgcaatgcctgcagctgccattagtcaatagaaaggatccagttcttctcaacaatacttgaacgcatatcacacaaccagtgcatcaaaagttgaacaaactgggctacaaagtttgcctcatctgccatactcacctgacctcttgcagctgactgctgcttcaagcatctcaacaactttttgcagggaaaccacttccacaaccagcaagacgtagaaaatgcttttgaagagttcattgaatcctgaagcacaaatttttatgctacaggaataaacaaacttatttctaattggtgaaaaatgtgttgattgtaatggttcctactttgattgataaagatgtgtttgagcctaattataatgatttaaaattcacagtccaaactgtgatgacttttgtactaacctaatagaattcaagtaatatagttaagatttgtgtagctttaaaaattgagatataattgacacataagtggtttttctttatatacatatacctcaaagtaagttttttacgaagaaagatatagtagtaacatgtatggaaatggcactgtgaataatagtgaagagcataaatggatcctcaaaattcttagatactgcaaatatcactgaagttaaaacagttgttttttatgtttaaaggattaaagacaattgaagagaagcaggaaacaaggccttgtataaagtgacactttgttgttgttcagtcactaagttgtgtctgactgctacctcagtgactgcaatactccaggcttccctgtccttcactatctctcggatagtgaagctcatatccatagagttggagatgctatctaatcatctcatcctcttctgcccccttctccttttgtcttcagtctttcccagaatcacagtcctttccagtgagtggtcttcttcacatcaggtggccaaagtagtggaggttcagcttcagcagcagtccttccagtgaatattcagggcttattttctttaggattgactggtttgatctccttgcagtccaagggattatcaaggatcttctccaacacagtttgaaagtgttagttctttggccctcagccttctttatggttcagctctcacatgcatgcatgactactggaaaaaccatagctttgactatatggacctttgtcagcaaagtgatgtctctgcttattaacatgctgtctaggtttgccatagctttcttcccaagaagcaaatatttttaagtttcatagctgcaatcactgtcagcagtgatcccttgaatctgtttgtcacctccactgtataatggtaagggattgatttagatcatacctgaatggcttaggacttccctggtggttcagaccgtaaaagaagaatccacctgcaatgtaggagacaaaagttctatccctgggtcagaaagatcctctggagaagggaatggcaacccactctggtattcttgcatgaggtatccccatgcacagaggagcctagcaggctacagtccatggggtcgcaaagagtcggatacaactgagtgactgacactgaatggcctagtggttttccctgctttcttcaatttaagcctgaattttgtaaaaagaactcaagatctgagccacagtcagttccaggtcatgtaaaaacaactcttaactgtatggagtttctccatcttggctgcaaagaatataatcagtctgattttggtgttgaccatctgctgatgtccatgtgtagagttgtctcttgggttgttggtaaatagtgtttgctatgaccagtgtgttctcttgacaaaactctgttagtctttgtcctgcttcattttgtactccaaggctaaacttgcctgttactccaggtatctcttgacttcctacttttgccttccaattctctgtgatgaaaagaatgtcttttttttttttttttggtgttagttctataaggtcttgtaggtctgcaaagaaccattcaacttcagctttttggcattggtggttggggcatagagttggattactgtgatgttgaatggtttgccttagaaatgagtggacctcgttctttgtttttgagatgtcacccaaggactgcatttcagcctcttttgttgactatgagggctactccatttcttctaagggattcttgcccacagtagtagatacagtggtcatccaagttaaatttgcccattcccatccatcttagttcatggattcctaagatgtcgatgttcactcttgctgtctcctgcttgaccacctctcatttaccttgattcatggacctgacagtccaagttcctattcattcaccaccagacacatccacaagtgagtgtcatttccacttttgcctggctgcttcatttttttggagctattagtaattactctccattctttcccaatagcatatggacaccttccaacgtagggggctcatcttccaacgtcatctctttttgtcttttcatactgccacataagaatgggctgtttcatactgctttccaggcacgaatactagagtaggtgccattcccttctccagaggaccatgttttgtcagaaatcttcacagtgacccatccatcttggatggccttgtacagcatggctcatagcttcattgaattgcacaacctttgccacagtaaagttgcaatccatgaagtggaaaaagtgacatacttgaaaaaaccaaagagaaatttcagaaacaaaactgtgtcaaatatccctaaggggaaaatttgtcaaattatacctagctgaagaattagttacccagatggtaaggcataagaaaccccagaatgcaccactgagagtcaaagacgtggaaagtgctgaagggagtaaagtgatgtgaaagatagagtgaggtctaacatcattaaccagagctccagaaagagaagaaaaagagattgataccaaggtaatgtttgaaaaggtatttctggctgacaaatttctagttttgatgagaaaccagcaatagatttaagaagctctgtgaatttttaacagtataagtaaaaagacatctctatccagacaaatcatatagtgaaacagcataaacttgaatacaaagagaaaaatcttaaaagcagcccaaggaaggtttctttcaaagtagcaaccatagaccaaaagctgagttctcaataggaaaacatatattcacaaaataactggagatttatatttataaattctatacttaagtatcactcaagaatgagggtaaaataaacatcttgttgaagaaagtccatcagccctttgtaaagaaaattgaaggatgtgttatactttagacaaagtttacatgtaaaggtctgagttgcaaggtgggataaagagtaaagagagtgacaaatatgtgtacatgttgaattaaacattcactgtataaaattagtaagaccttaattaaggatgtgttctaagatagtattttctgggggaaggtaaagtgtgttaattgatgtgactttgataattccatgttttaatttctaggctaaatataactctaaaaactagacataacttctaggagaggggaaacatggaatacaaaagaaaaaattatcccaaagaaaaccagaaaggatgcaaaataacaaagatcaggaaggacaaaaaacacggattagggtgattacattaagtactaaatgagctaaatggttcacttaaaaggcaaagattgttagaccagattttttaaaacatggtgttatggagtttatctgggacttatgtaaaagttgtaagataaatcatgcagatttaacaacgtgaatgtggtacaattattttaatatcaaagtagacagtaatttagaaagatgtattggttatcaggggactcccttcaaaatatagaatgaacgattcactaggaagacttaataacgttaatcatacaggatagcctgaaatgtagcttcaaaatagatataacaaagatttacaagactacaagaagtagaataatttacagtaatgggatattttaaatatttcactcagtaattgatagaagcaacaggcacgttatgcaggatttaaagtatttgaacagcataatgagcaaacttaacccagatgatttatagaacctgttgtacccagtggaagaagactacacatcattttcaggcacataaggatattgggaaaattgactgtataaaacaagtttcaacagatttcagaagattgaaataaaaagagcatcttttctttccataacacatttttattaaaatttgtcagtaaggtaattttaaaagcttcatatgtttataaagtgtgtaactactttgaattaatccatgtattaagaaagaaatcacaatggaaattagaaagtgccttgagctggatgagtacataattttgatgtccaattgtggaatttggtcaatctcaggttgttaaaagtgggataaggagatgttatgtccctcacatgtaaaggatcttgacagaaaaatagcaattacccagcaccaggctatgaaagattctttattggagggaaaaaaaaggaatcttatcaaatctctcaatcagatctctagatctagctggcttatgggaaatatgggaacaaggtaagtgatcccgtgagaaaacaaatcaaaccagaaagtgggactttctacagtatacctgacttttttccctgacaaatcagtgtcactgtaaaggaaagaaaaatagggaaaggaaaggataggtgtactattagaataaaagttttgattaatgtaacagtcactccccccagtggaaacaaaattaaaaagttacagaatgcaactaaaatagtacatggagaaaaattcagtcttaaatgtgtttgctgcaatacaagaagtcgcattaattgttaaatttgatatccatttataagagcatcttaattttgataaaacctgaaaaataaagaaggaagcaaataataagagagtcatacagtggatagcaaaggcaaaatttattttttagaaagagaaatggataaatcttgaatgatagtgatcaagaaaaaatgtcataaaataaccaagagcaaggagcaaaaaaaaaagtaggggagagtggaagagaagatggcattacataccctgaagacattttaaaagatcaaagacaaaattatgaatggttttaagccagttaattagaaaacttcacagaaatggacaaattcctcaaacaataacaccgaaggtgactctagaaacttgaaaggagtattacagcttaaaaccagtagtcagagctttcccacaaagaaaaccaatagttcattcaaggaacagaatttctatcttgcatatgtttttccagagaacagtgagagagaaaatgttctcaacatcttttaaagttagcataactttgattccaaaatgagacaagaatacattttaaaagaatattaacaggttactttcttttaggaacaaagatgtaaaatttctaataagttattaatatatttatctaaataagatgagagtgcattgtaatcaagttggatttatcttagaaatgtaagatttaataccaggaaaataaatttatttgtaataccatcttaacagcttatagatgaaacatatgatcttctgaatagttgcaaacagtgcttgataaaattgagcattcattcgtcataaaacctgaaataaaactcatgtgctaaggttatctactataaaaaaatcaagtttcataatgttggaatattgaaaagtttccctctgagattgggagagatacaatgtccattataattactttttgtcagcattatactaaaagttgtgaccttcactaaagcaagaaaaagaaattttaaaaacttgaattggaaaagaagaaataaaactatcactattcacagactagacatgagtgtgtatttagaaaaatctaaaggtatctacattgttaaaaaacagtaagggtttaacaagattgctgattaggaaaatgaaagatcactttattactatattctagcaaataaggaaaatctaaaactgtaatttcacaatagaacaaaaaatatgtgcctagaaataagtctaaaaaacagtctaagagttctaggatccttgttgaaataaattttaaaagacctagtaattgaagcaaaataccattttcatggattgataaaatattttatcaccattatcattatacccctgatttttcatcatgcccaacaaaaactcattaaaaaataattccttcttcctctcttcccccaccttggtaacctctattctactttgtctttatgggtttgcctattttaggtacctcatataagtgaaatcatacattatttgttcttcagcagatgaaatgtagtgtctgtcttatttcactaagcttaatgttttcagagtccatcttagtgatgacatatatcatactaaccgccaaactgttttcccactggccttccatttacgttctcaccagcagtgcatgaggattccagtcttttcacatcctgtagcacaagctggaatcaagattgctgggagaaatatcaataaccccttatggcagagagtgaagaagaactaaagagcctcttgaaagtgaaagaggagagtgaaaaagttggcttaaagctcaacattcagaaaactaagatcatggcatctggtcccatcacttcatgggaaatagatggggaaacagtgggaacagtggctgactttatttttctgggctccaaaattactgcagatggtgattgcagccatgaaattaaaagacgcttactccttggaagaaaagttatgaccaacctagatagcatattaaaaagcagaggtattactttgtcaacaaaggtccttctagtcaaggctatggtttttccagtagtcatgtatggatgtgagagttggactataaagaaaggtgagtgccgaagaattgatgcttttgaactgtggtgttggagaagactcttgagagtctcttgaactccgaggagatccaaccagttcatcctaaaggaaatcagtcctgaatattcattggaaggactgatgttgaagctgaaactctaatactttggcaacctgatgtgaagaaatgactcattggaaaagaccctgatgctgggaaagattaagggcaggaagagaaggggatgacagaggatgagatggctggatggcatcaccgactcagtggacacaggtttgggtggtctccaagagttggtgatagacagggaggcctgacgtgctgcagttcatggggtcgcaaagagtcagacatgactgagcgactgaactgaactgaagcattggtggttcagtgataaattcttgcctgccaatttctccacatccttaccaacatttgcaattttaaaaaaaaattagctatcttagtggacatgaattggtatctcattgtgaggttttttgttttgtgaaaactgcatttgtggcatgtggggtcttagttccccaacaagggatcaaacccatgcccccctgccgtggaagtgtggattcttaaccattggtccgccagggaagtccatcattgtgagttttgtattgggtgatttactcttaatgacagttcctcaaaaatctaaacagaattataacactacccaggaattgaaaacagagacttgaacagatagactatgtatctgtactgtgtgtgtgtatataagtatgcatatgtgctcactcagccatgtctgactctgtgatcctgtggactgtggctttccaggctcctctgtccatggtattctcctggcaagaatactgcagcgaggtgctgtttccccctccagggcctcttcccaatccaggatcaaagccatgtctcctgcactgcagggggatgctttgctgctgagccaccagggaagcccgtatactagatatctgctaatgtctactaatattgattgcagggttatttacaataagcaacaggtggaaacaaccctcatgtctgtcaacagataaatgaaatgtagtacatacaatgaaatactactccgtcataaaaaggaatgaggttgtgatacatgatgtaacatgagtaaaccttgaaagtgttttggtaagtgaatttagccagacatagaagacaaatactgtaattctatttatatgaaatacttggaataggcaaactaatagagacagaaagtagaatagaggttaccaggggctggaagatgagggaatgggagttagtgattaatatgaatattagtttaatgtcaggtagaacctagtcttacttctcaccatagtgcagacttttttttattttctgtaacattcctgacagatgttcagttgaatacccttaatattaagtcagtttgttcctttgtcaagtatctttactacgaataaagataaaattgtagagctcaaatttaccttctctaggttcaaattcagtcttagtttagctctctgagacagcacagaacagtctgtctctatttcataccctggctctctcattgtttgacatgaacacacacatacacacacagcatttagacctttctttgatactgtttacttgtttgccttcaaacgtattcaggccatcccatcccatccaaaaacaaaaatactttccctgactctactaccccttgagcttttttgttctgatcactaaatgcctttttttagtaactcactcaaaccttacttcttgaaagtcagtcttctatttctgttacacagctgaatctggtcttttgaaggccactggtggtggtggtttacttgctaagtcatgtctgactcttgcgacactattgactgtagcctgccaggctcctctgtccatgggattctctaggcaagaatactggaatgggttgccatttacttcttcaggggatcttcccgacccagggatcgaaccctggtctcctgcattgcaggcagattcttcaccaactgagctacaagggaagcccttgaaggccactatgtatccttaataatcaagctcccctgtgaactagtgtcagttctcatttccagttatctcttgagtattttaccttaatgtctcactgacatcacagagtgatcaggtccaaaattgtgttagatctttccctttcaatcttcttcccttctggtaatattttccacttagcatacgttatgcttgaaacttcagagcatctctgatttcacctgtcttcttatttttcccgtgcagtcaatggaaccgtcatgattgggattattagttcttttataagtgatctcagagagctagcttgtccctttttccatgtgagattatagctagaaagcaccatctgcaactacagagtggatcttcactagaccctgaatctgttgacaccttgattgtggacttctcagcctttagatctgtgacatatctatttccaggccactcagttcatggtgttctgtaataagcagtccaaacagactaagacaactgctattgctattaaggcttatgagactgtgacctccaggtcagtaaggactgtcattacagaattcctgatgcactgtatatcatgtgacactagtattaggcctttataaagtatgtgtccaaagtacaagttacttttagaattagatgataaaacatctaagaacttcacatattattatgtccagtacatagaaggtactcgataaatggtggttcctttccttgtaagatagtttatgctttacattcattgattatatttattcattcttttgtttaaagtttaaaaatactgagctcccttgtgctggttgctgggtgctatggtagaaaaatgaatgtcagtctgtctttaagggtcttatagtctagtggtagaagcagacaaatcaagaattaaggacagtatactatgttaaaatgtggtccaggtgccagaggaatcatagagcaggagcatataattcaaaatggttgtaggggatagaggatggaaagattttttggaagagggatacttaaactgaattttagctatttaagatgtgcaagacttttataaagaaaggtaattaaactttatttagagacagaaagcaacacccaaatacatggagttatataccatatcctgaggatggattgaaagactgaatggtgaaaatgtcagtttttctcaaattgatcagtaatttattgaaatctacacctctgttagtttttctgtggaatttgacagcttgattaacggtttcttttgaagtaaaaagaggcaacaattgccaagatattcgtaaagaacagtaagatgagatgactcctgtaatacattttttttttttcagtcaacaaatttgaatacttgctgtatgtgaagcactgctgggccctggttattaccttggtgaataagacacatggctcccaccaaaggtcacattcaaattcacttctagtgatatctggaggttttaacaaaccacttcctaaaatgtcagatgagtgccaagaatacgaacagacttatcactctaatttttattatatgactttttttatatttaaaatttttcctcactgtatatgttctttgtttatattttcctttgtgaatttttttaaatggtcggaagcctagaagtagactggtttttctttaaatagatctttaagaatgtcagttgtattacagccttgttagaaaggcaggagagggttgggatctgctgctgagtgatgtccagagcagttaacctgaccttggggagccagggagagtgactttgagggttccacaggcatgattttgagacctaggcagttgggtgtctgaggtctagcctgtggggtgtcgtgagtgagtgagtgaagtcgctcagtcatgtccaactctttgcgaccccgtggactgtagcctaccaggctcctctgtccatgggattctccaggctagaatactggagtggattgccatttccttctccaggggatcttcccaacccagggatcaaaccctggtctcccgcattgaaagcagacgctttaacctctgagccaccaggtgcctataataagaaaagggaagatgaataacaaaataacagatgatactatgtaagtagaggttgctaaatgagcttcatatgcttttatgggggtaggtgggtggaaacatgtttaatggcaaattagttgcttattgcattaaataaatgaagttctaccccacctctttcttgctatgaataaaaattaattactagtgagggttaagtacaaaagacaaactcagaaagctttttaaaataaggggcatacttttatgagctcaaagcagggaaggatttcttgagactgaaaaacgccataaaaattgatgaattattgactgtgttaaaagtagaaacttaattattgagactcccttaacagacttaaagtacaggatcaaagatgtttgtaacacatgcagtagctgcctgttgctgataacaagtgtttgtctctcagtttctgtggatcagggatctgagagcaacttagcttagtggttctagctcagtgtctcttgtgaggctgcagtcaaggtgtcggctgggcctgcaattatctcagtgtgggcctgaagaaggacctcattccgtgctgcctcttgcacatgtggcagccttagaagatccagtttcagattcactcacatgggcctcctcctagggccgtctcatagcatggcagctggcttttcttgggatgagagatccagatgagagtgagactccctaaggtgacagccacagtcttttttgggggaggtgagaggggagtggtgagtcaaagtcagtcagttgtgtccagcactttgtgaccccatggactgtagcccgccaggctcctcttcccatggaattctccaggcaagaatactggtgtgggttgccattctctcctccaggggatcttcccgacccagggatcaaagccaggtctcctgcattgcagggagactctttaccatctgagctgctggggtctttttttctaaagctattttccctgtgctctcctatatatccttgtaacttatttattttatacatagttatttgtaccccttaatcccctacctctattttaccccttcctccttcccttttccttctgtgactctgtttctgcttggttatatttatcacttgttttatttcttagattccatatgtaagtatatttgtgtttttctgtctaacttacttcactaagcatgataccctccaagtacctccatggtgttgaaaatggcaaaatttcattcttttttatggctgagtagtattccattgtgtatctatagatagaccacatattctttatccattcatctgttgatggacacttaggttgattgtcttcttaatcttaaaagtgacattctgtcacttgtgccagtctattcagtagcaagtcagtaagcccagcccatactccaggaggtgaggttgaacaagggcatgaatatcaagaggtgacgatcattggggcctttatagatgttatatcctccatgtaatgaagggaccactgttatgaaaatacacctgaggagctgttcactaagacagcaccaagcagaaaaaggacaagaagtctgagaaggcatttgatggtaaaagaaatttaaataactaatgaacagagttaaaagatcattatcctcattaacaattgaatagaaactcaaaccactagagaccattttatacagactacatggacagaaataaatatctgacagcatcaagcattagcaaggatatggagcaatgggagttcttccactgctgctaggagtatgaattgatgaaccactttacaaaataatagttttctacaacctacaatactactgctgagtagttaccctagaccagcggttgtaagatttgagtgtgtatcagaatcacttgtgggggtgcagtgcagacagatgtctgggcccagccccagagtttctgattcagttgaagtggaatggagcctggtaatttgtgttattggcaagttcccaggtgatgggaacttggccgaggaatcatactttgagaaacaaccactgtcctagagaaatgtgtcaatatatggactagaaagcttacttatagaaaaatgttcatagcagcattattcctattaaccccaaagtatacagacacaaaattaaggtgtccatcaatagtggcttagatagataaatcattgtatattcatttatggaataaaaatattgttcagatagaaaatctgtctcccgcatcaacctgtacaaatctcccaaacatatttagtcaaacattagaaaatcacagaagattctatacatgattctgttcataaaaagttcagaaacaaattaactatattgttcaggaatgcaaatcaagttatcaagttctataaaaggttctactgggattttgatagtgattgtgttaaatttatatattaatataggacatagatatttacaaattgaattttctagttcatgaacatggtcttgatcctcatttattttagtccgttatttccttaaataaatgtctatagttttcaatataaggttcttatactttgaggagtgggggattagttttattcccaagagtcttttctgctattgcaaatgggattaggaaaacaaaaaaacttatcgcagggaactgattttttcttctgtacattgattttaaaaaatctgattcctagagaagtcttattctcaaattcatcagtggattgtcttagatttttaagtaacactcatatgtgcaaatgatgattgttttattttttcctttctcatgtgtgagtctctgttttcacacactgcttagggtcttgcatacaatatttgatagtagtagtgatctgtatcactgcatttttatttttcctatctttaatgggaatgcttctatatgcttggtgatacagtttctggtttgagagatttgtgtgtgtgtgtctttaatcataaatgggtattgaattttgtcagattttttttacctacatctattgaggtgattgtatgattttcttctgctctggttttcttctttgtgacttccctggtggctcagatggtaaagcatctgcctacagtgggggagacccgggttcaatccctgggttgggaagatctcgtggagaagggactggcaacccactccagtattcttgcctggaaaatcccatggacggaggagcctggtaggctacagtccatggggtcgcaaagactgggacacgactaagtgacttcactttcctgttgaggtgattgtatggttttcttcttctgctaatgtaatttaattcattacatttgccatacaactttttatttagtgctgttacatctgtgcttataaatgagattagtctataactttcttgtgctgttctacccagttttggtatcagaattcatgttgttagaaagacctgattaattttctaagatttttttatggtcttgaagagtttttataacagagaaaatgtttcttgaaataacttaaaatgattatggttttatcgttgcttaggattccctgatttaactacccttttcaattaaccaaccatcagacttcaggattacaattgtgatgatttactttgtagagctgggattacagtttctcttagcaccctacttttctggtcatctaaactcataactgaattattaggcaaaaagttttcagtctttctcttttggaatagctgtttactctctcagaaccgtaaattcttccttgctccaaagcagggttttcttagggtactaaatttatcaacagtagttcagattctcattacttcttgctgatagttgtagcgtgtttttaatgagagtcggcctgtaaaaactctctgacttattagttaacttaaacattgttgccagagtaaacaacctaaaatatatgtctaatcaggtcaaaagacatttgtaacaaaaactgcatttaaaaaagttactgtatgatgtctctgcaatcagctatctgttaaaaaattatttaaaaaatatatacatgcacacagattctgaattgtgattatctgctgtgagagtgtaatgagtatgtggtatagattgggaggaggttagtgaggaaaggctgcttggaggaaataaaatctaaaaatctcttctatctaaacaagttgctagcttagaaaagttctgagccgagttttctcagaagaaggaatagtggtaaagctttgctgctggaacatgattgtggttgagtttattgagtaagagatgaagagaatagtgcctaatgaggcaggagatagacagggggcaaaatccttcaggatcttgtatgctttgctaagaacttcaggttttattatgagtcattgatgagccggtaaaagctttaagcaagaatgattgtggtcagatttgtgttttagagattacactggagaaaggatatgagaggaatggaagtagggcaaaagaagtgggggagccagttaggatgcctttgtaagtagtagttcagggagaaaagataatagtttaaactagagtaatgataatagtttaaactagagtaatgatagtaaacaaggtaatgcatggaatgattgtctcataaagccattaaaataacctacgaagtatgagcagaaaaagatttggaataaacttatcaaagttcatctagtaaatggtgatacagaattgaaacctggggtgttaaccatttgatcatatttttaaaataaaagccaactccactgaagatttttcagcctacctttattacctttatcaccaatgctatagccagaccaaactgtggaaatagttaatttgaacataccgctggttttagaaaaggcagaggatccagagatcaaattgccaacattcactggatcatggaaaaagcaagagagttccagaaaaacatctatttctgctttattgactatgccaaagcttttgactgtgtggatcacaataaactgtggaaaattctgaaagagatgggaataccagaccacctaacctgcctcttgagaaacctgtatgcaggtcaggaaacaacagttagaactggacgtggttccaaataggaaaaggagtacgtcaaggctgtatattgtcaccctgcttatttaacttctatgcagagtacatcatgagaaacgctggactggaagaagcacaagctggaatcaagattgccaggagaaatatcaataacctcagatatgcagatgacaccatccttatggcagaaagtgaagaggaactaaaaagcctcttgatgaaagtgaaagaggagagtgaaaagttggcttaaagctcaacattcagaaaactaagatcatggcatctggtcccatcacttcatgggaaatagatggggaaacagtggaaacagtgtcagactttatttttttaggctctaaaatcactgcagatggtgactgcagccatgaaattaaaagacgcttactccttggaaggaaaattatgaccaacctagatagcatattgaaaagcagagacattactttgccaacaaaggtccgtctagtcaaggctatggtttttccagtggtcatgtatggatgtgagagttggactgtgaagaaatctgagcaccgacgaattgatgcttttgaactgtgatgttcaagaagactcctgagagtcccttggactgcaaggagatccaaccagtccattctgaaggagatcagccctgggatgtctttggagggaatgatgctgaagttgaaactccagtactttggcaacctcatgtgaagagttgactcattggaaaagactttgatgctgggagggattgggggcaggaggagaaggggacgacagaggatgagatggttggatgacatcactgactcgatggacgtgagtctgagtgaactccgtgagttggtgatggacagggaggcctggcgtgctgcgattcatgggatcgcaaagagtcggacacgactgagcgactgaactgaactgaactgtaccttgatggcactgatgattgtttactgtgactggagtactccaatcccatatacttaataaaattcagactatcctttgggatccaggtcaaatatgaagccttccaaatttgcctcctgacacacattgtccctttaccttcttttaaccagagtagtttctttgtattgtaatatgttaatccagcagatatttatgtgatgactgtgtgctgggcactgtgggtacacattgtgaagatatttatatatagaaatagatatagtcactgtcactgtagaacttatagcccagagataacacagattttgaacaaaatctgtgcacacatattgttgtttagtcctgcagtcatatccaactctttgcaaccccacggactgcagcacaccaggcttccctgtccttcactgtctcccagagtttgctccaactcatgtccctggagtcagtgatgccatccaaccatcgcatcctctgccatccccttctccttttgccctctttgccagcatcagaggcagttagcccttcacatcaggtggccaaagtattggagatttagcttttgcatcagtccttccaatgaatattcagagctgatttcctttaaaattgactggtttgatctccttgctgtctagggtattctctagagtcttctgcagtaccacagtttgaaagcatcaattctttggtgctcagccttctttgtggtccaactgtcacatctgtacatgactactggaaaaaccatagctttgactacacagacctttgttggcaaaatatgtctctgctttttaatatgctgtctagatttgtcatagcttttcttccaaggagcaagtgtcttttaatttcatggctccagtcaccatgtgcagtgattttggagcccaagaaaataaagtctttcactgttttcattgtttccccatctgtttgccatgaagtgatggaaccggatgccatgatcttgattttttgaatgttgagttttaagccagccttttcactctcctctttcagcttcatctagaggctctttagttcctcttcactttctgccatttctgcacacatatatttgaattaataattacaaattttaaaaagtgattattaaggaatagtaaagaatgcctgtgggttcttgagacccttagagggtctttgagtcaaaactgtttttataatactaagacattatttgcattttcactgtcaattctcttgtgaatatacagtgatgtggtgtgtcatagtgcagcagattgaatgcagaagatatgaaaattcagatgtcttctgttaaggtagatattaattagtattatagaagaatgccactttccatctccactgtttcttgttgctttggaaagtgtagttatgttttttcataaaaactagataatttgtgttaatgaatatattgtaatttttaagtgaattaagtataaaaatttcttggatataattttaatatagatgaatattgattactataacctacatgaataaagtctctgggctcctcaataatttttaagactctaaagggatcctgaagggaagactaagagtcttctgtagtgagaacctggcttatgttggtagcttccggagaagtaaaagataccttatgtttccttttaaattcttacgttttttctaaaaagtagagtctggttatctctgtatctccaaagcctgtaattatttgcacataatgggtatgtttgttaaattccatttttaagttctgttgtagatggtacattgtttgaagcctttgttcagatactgtcatttctaattgctaaaggagatgtatctggattcagattcctcttcttacgagtttgagcaagttacttaaccttattgagccttaccactcatctgtaagatggaatacatattatcttactctgttgtagtgatatgaattaatacatgtaacctcattagtaaatgatatttactattttattgtgtgtttttacaaacacgcctatttctgtgcctgttgttattttacatacagagcatgtacattctgggcttagttatgttagtaggcagagaggtctgtgaataaataagtatataattttaaaaaatcaccatttgagtacatacaacagtttatcaggaaggtgaaaaccaaaataatgtattttgtggttattcatcttcatagacaagggaactgaaacaaaacgtgggcttggaatagttttaagtaactccattatactataaggatagggacggtgcctcacatttactgaatttttgaacagtattaaatagctgctgctgctaagtcgcttcagttgtgtccgactctgtgcgaccccatagacggcagcccaccaggctcctccgtccatgggattttccaggcaagagtactggaatggggtgccattgccttctccattaaatagctggagatacttgaaaacatgctttagaaatcttgaaaaataagtactgtagattaaaggttaagccccaaaatattgcacatggctaattgaaaaagtaactaaaggcaccatggaagaaaaacagaattgccctgagagaataatatgagatgttacagagtgtgactaaatatgatctagtaaaataagagaacataggacatcctacctgtggtggattctaaattcagtggtttaaatcctaactgtattaaaggtagactccttaagatgacagtgcagaatgtttgccaaggggtgaccaggaaatacgaagatcaagtgactgctttgcttttcatagcagaaagctgtaggaaaattatcctttatattctgttttgaagcagataattcagttgtgcttaaaaataaaaaaagagaaataatgttttttccttaaataagataaaaactgtaagttggctaaacgtctaagtttggacctagaacttggttacattttgaatagaaagggttatagacattctgttcttggtacagtatgaagttttctggggtgtgtgtgtgtgtatgtatcctatatatatacatacatatattcatagtatttcttatttgaagattttgtcagtttaaggtttacttgatttttcattgattattactgtgtattatctccatagctgtagtcattgaacttgcagtctgttaggttgtgatctcatttgtatttaaagcaaatgaaaagctatcctgctagttacgtttcctatttaagttgatcatgcagtcagagcgagttgattgaaaaaggttgttaactgaaaatggttaaaatggaaaattatttaaagaaagaaggagatacatattttaatttattaaaacatataaatatattcatatgcctatattttgatatagggtttaagttttttgtttgattaatggtgttctgagtggagttacatgtttttaattccgcaaccatacggtaatgcattatccgcagttgcctgttttctttttattttaatcatctgtgagttcagtgaacaaattagtggagattctaggggagagatgatggtagcttggactagcaggggaagtagtaagaagtaatctgatccaggatgtatttcaaacatggaaccaagataattttctcttgtactaatttccaaatgtataacttttggacctgaaactgaaaaagagaaaccactgctcagaactgaatatgtgttctggaagatccagtaagatcttttttcttcacatctgaaatccaccttttccagtgagctccattggctctacctttgaaatacagtaagtcttcaacacagaaaccttctagtagtgaactttaaagtaatatgtgaatgtgcaatgtgtcaaagtcctattgttgacatctttaccatctcccaacccctgcttcctcctccgggcagtaattcttgcctgttcactcgctaccagcctctgtatgccagctgttgtactgtactctgagattaaaaattattttttgtgttttttatatatcatttctgtgaaaagtattataaacccattacagtacagtcctatatagctgatggtgttacttggttacatcggctaattttgttggcgttatgaacacactcttggaacggaactcgttcatatgtaggggttttgtgtgcctcttaaaccaagtaacttcccactgttttctttgccactatcttaggcctcactgctgtcatccccccagttagtgcaataatcttccaactgatgttgcccccttatattttgttctgtacatagcaatcagtcagtcagtcagtcagtcagttcagttgctcagtcgtgtccgactctttgcgaccacatgaatcgcagcacgccaggcctccctgtacatcaccatctcccggagttcactcagactcatgtccatcgagtccgtgatgccatccagccatctcatcctcgatcgtccgtgatgccaagcagccgtctcatcctcggtcgtccgcttctcctcctgcccccaatccctcccagcatcagagtcttttccactgagtcaactcttcgcatgaggtggccaaagtactggagcttcagctttagcatcattccttccaaagaaatcccagggttgatctccttcagaatggactggttggatctccttgcattccaagggactctcaagagtcttctccaacaccacagttcaaaagcatcaattcttcggcactcagccttcttcacagtccaactctcacatccatacatgaccacaggaaaaaccatagtcttgactagaaggaccttagtcagcaaagtaatgtctctgcttttgaatatactatctaggttggtcataacttttcttccaaagagtaagcgtcttttaatttcatggctgcaatcaccatctgcagtgattttggagccccaaaaaataaagtctgacactgtttctactgtttcctcatctatttgccatgaagtgatgggaccagatgccatgatcttcatttctgaatgttgagctttaagccaaccttttcactctcctctttcactttcatcaagaggcttttgagttcctcttcactttctgccataagggtggtgtcatctgcatatctgaggtgattgatattgttcccggcaatcttgattccagcttgtgcttcttccagtccagcgtttctcatgatgtactctgcacagaagttaaataagcagggtgacaatatacatccttgacgtactccttttcctatttggaaccagtctgttgttccatgtccagttctaactgttgcttcctgacgtgcatacagatttctcaagaggcagaacaggtggtctggtattcccatctctttcagaattttccacagtttattgtgatccacacaatcaaaggctttgacatagtcaataaagcagaaataggtgtttttctggaactctcttgctttttccatgatccagaggatgatggcaatttgatctctggttcctctgccttttctaaaaccagcttgaacatcaaggagttcatggttcacatattgctgaagcctggcttggagaattttgagcattactttactagcatgtgagatgagtgcaattgtgtggtagtttgagtattctttggcattgcctttctttgggattggagtgaaaactgaccttttccagtcctgtggccactgctgagttttccaaacttgctggcatattgagtgcagcactctcacagcatcatctttcaggatttgaaacagctcaactggaattccatcacctccactagctttgttcgtagtgatgctttctaaggcccacttgacttcacattccaagatgtctggctctagattagtgatcacaccatcgtgattatctgggtcgtgaagatcttttttgtacagttcttctgtgtattcttgccacctcttcttaatatcttctgcttctgttaggtccataccatttctgtcctttaccgagcccatctttgcatgaaatgttccttggtatctctaattttcttaaagagatctctagtctttcccattctgttgttttcctctatttttttgcattgattgctgaagaaggctttcttatctcttctgactattctttggaactctgcattcagatgcttatatgtttccttttctcctttgcttgcctctcttcttttcacagctatttgtaaggcctccctagagagccatttttcttttttgcatttcttttccatggggatggtcttgatccctgtctcctgtacaatgtcacgaacctcattccatagttcatcaggcactctatctacataccagtaggaataattatttaaaatgtaacttatataatgttactcattgcttagaaaactacacttaaaacccaaactttaaattgtggtttcaaggtttatataatctggcccctaccagcttctatagcttcatcttctagactgtgattctcaaaatgtggtccaagggaagctggaggtccctattctccttttaggagacctgtaaggccaaaactattcataatactaggatgatatttacctttttctctctaattctcctgactgtagaatcaagtttctatatgctacatgatctgtgttattgttacaagttaatgtagaaaccagtatgacaatctagctaccttctgttaaactagtcattaaagagaattgcaaaaatgtaaaactgccattcttctcactaaattttttgttttggacagtggacttgttttttatttttaaaaaaagttgtttaacacataacagttttattcaaataatttaaaacataatttcccagtctgatttcttaatagggcaaatatcattagatataactcacagaaacagcagtttgggggatcctcaataatttaagagtgtaaagggatcatgagagcatactcataaattttgagagctattgtcttgcactgtatgcattttcttacgtcacatcagcctcactggctttcttgttgtttgtagaatactccaagcatacttgtaacctaggacttttttcattaattgctatttttctctacctgaagaatattttcaccagctttctcaccttactctcatatctgttcaaacgttactacctctttgagaagacctttcctaaccacaagcctacagtttctgaaaaagccttctcagaacttccctggttgtcccgtggttaagactctatacttccacagcagggggcactaattctatccatggtcaaggagttaagattccacatgccacatggtcgtggtgtggccaaaataaataaataaaattttagaaataaagcaaaagagcctctccctactctgtcttttgccttgattgaatttttttcaaagcattgattcactgctggaaattatacatttgttttcttgtttatttgttcccttaatagaatgtatactccatgagggcaggagctttgttacatgtctaaagcctagaatagtgtttggtacataaactaaactgttaatcagtaaaaagaaaatacacagaaattgaattcattagtaaaaatgtaagtgatttagaagatagactaaggaaatctaacatgaattaatagatttttagaaggaaaaaagaagcaaggaagtaatagttaactgaataatagaaaactatatcctgacctgaagaaagacttgaatctgtatactgaaaggcagaataataagcagaagttatactttgtagtgaaattactgaatattagggataaagatgatcagaagcttagaaagaaagctcagatagaacaaaaaggaaagattataaggtcaacaatggcaacactgagaggtaaacaacagctgtgattaagaatcccatacctcatcaagatattttcagacacagaaggaaccaaagtatgtccatcacccatgtacactatgtgtacatttgagagagatgattagtaaaactagaaatcaacatatatagaaaactgatctcatatcttttaacataactttcttagaattttgaaacatccttttaaataactggttctcaaagtgtgatgcccgtaccaccagcagcagcattacatgggaatcttaaaaatgaagactctcctgtagactgactgaatcagaaactctgagcttgatattctgcagtctgtattttaagaagccctttgagtgattctaatgcatatttaaagtgaattgcttgtagaaactgtgtatttagattttttcatccattctcatggtctttatcttttaatttgtatctgtacactatttacatgtaatataatgatatatttttaaaagtgtatttatgtacttacttttggctctgctgggtctttgttgctgcacagactttgctctagttgcgaagagtgagcagggggctactctctagacgtggtgcaccagcttttcattacagtggcttctctttctatggagcacaggctctagggaacatgggcttcagtaggtgtggcatatagcttcagtggttgcagattctggctctggagcacagtctcaatagttgtggcgcacaggcttagttgctctgtggcatgtgggatcttcatggatcagggatcgaacctatgtctcctgcattggcaggtggattctctaccattgagctaccagggaagcccagtatgttttgatttaggttaaccagtttagtaattcgttttctgttagtttcctctgtttttcattactctgtttctcctttcctgccttctcttaggttatttgaacattcttttagtattccatttaaaatttacctagtgtgtttatttttagttatatctctcaatagtttctttagtggttactctggcagttgcagtatatatactaaagttttcattgtctgcttagaataaattatctactcccctaagtggattatggaaatattactactatatagatctctttatgcccccccccccgcccccaccaccagcaactactttctgttatccttgtcttgcatgtttcatttcctttatggaaagtctcattaggaaatgctataaatttttctttcagctattaaacatatttaaagagtgtaagaggagggtattaatgtattgtgtttacccagatatttacctttttttttttttttctcttcattcctgctctttaaggtttccttttgatacaatttctcttctgtttgaagaatttcttttagtaattcttttggtagcagaatttttcattttatttatctgaatatatctttattttacttcattgctgagagctattttcactgggtataaaatactaggttgacagttcttttttatttttaatttatttattttttattttactttactgtattggttttgctatagacagttcttttaatactttaaaatgttgtgctactactttctgccttcatggtttcttttgagacacctgtagtcatctgaaatgttattcccttgtagtttatgggtcatttgtctctgctttcaagataatgctttgtttttagttttcaacacttgatgtgtgtagtatgtgtttctgtgtacttacccattttgggactcatctttcggaatctgtagttttatgtgttttgaggagatttcaaccagtatttcgtcacatattttttattgcttcattttccttttcttttggaagtcagtgacacaaatgttagaccttattgttattgccctgtagaaccccaagtttttaaaaaattttgatctctttttttttttcttctgttaagactggataatttcagttgatctgccttcatgctccctgactcctctgtgttcattctgctgttgagagcatccattgagttttaaaatttttgttattgtaattcttactgtcttctgttgtttcccgagactctagttttccattgagttctagagtattattgattgcttgttgaagcatttttattaaagttgctttaaagtttttgtcagctaactccaacatctgagtcatcttggggtttgtaatttttgcttatctttttcatgtgatgtgggggttttcctagttctttgtatgctgagtaattttgaattgtttgctggaccttttgaatattatgttaagagaattaatctgattttagggaatgatagtcatataagttcacaatgagataaagaagtgttctctgtgattctctcctttccctcactccttttttttttttttgctgtgactgtgttcaggagagcaaaaacttacagcatcctagttggaagatagaccaaagcccttttttgtagttacctgaatcagaaaggtgatgtcgctaaagatttgggagtaaagggagctacctgaaagcacttttgatgctaagattatctagaacctgggagatgtgtatactttcaagtagggccttttgctattagttaataaaagttgagaactatcataaatagactgaactaataatattaatttgaaagagttcagttactttttttccctttaaggttttaacatatccttttaaaatgtagttttgaatatgtttgagacctgtttttattttaaactttcttaaaagttaatataaaacatatacatcttcatattgtaactcatagaaaagagtttattgttacttgattatcacaatagattccttaagtatataaaggaaagaattattaactgcatttctttgatcaaagaaaattatcttaaaagtttaagcagaataagatttcaacagatgtcagaatagtcttaagttctctgtcactatcatagctttattttgtggtaggtttataatccctgttaggaaatgttttctaaatgctctgtaattgatattttatcctgtaccctgatgacaaaaagaggcctctggttacctgttttttaatctttgctcagatattcatcactgccctgccatgctcagaggtgcaggttcatatacaatgatgatttctcttccctttacccttcacctctctcttcttttccttcttcttcttgttttttgttgttgttgttgttattgttgaatctatgtaaataagatctattgactatatcaagtttcagtgaaagttacctccttgtgttaaaagttatctttttcaatttatacttggtaacttgatttgactacttgaatttataaggattattgcttatcagatttttaaaaatcattagcacatgtaacttctgttcataacacattgaatagaactatttatataaccttttacatgagcagaatagtggatacctctagcttatgaatatttctttcacgtgtctatttttcagtgttaattaatttgagccttttatctgggctttccagccaatcacagaattcattatgaagctcgaattagatgggcatgtttgcagccagatgcatttcttcctagtttttctgtcatctccagggaatctggtcttctggtgtcttcagccaatggagactaaaccaaactcttcttttaaatacattatttggcaaaaacagtgttggtcaaaacagaaacttaactcattcagcttaatcaaaaagagggaaatttatgggaaatatactagagtaattagttgagctataggaatcagtcaaggtggacctcaggttgcccagcaccagtgagttctaaatatttcccacctttttctacttgtttcttaatatttgctccttatcctctgttggagatagacttacccatgtgctggaaagcatggctataagtagccctaggttcatttgcttctacttaaatgactatagtcttatgtgtatagtgaagaacagatacatagccacacatataatagtcaggaaagctacatttcaggaaaattgctgggaaacaatttaattgttcctaactagaatcatgtgcccacaatactcaattacctggtctagtgggatgaagtacatgattagcccatcttgtatcatgtgtccttcctgtggccaggtggcagtgtgtgtcgtcagaagtcaggtgttaatataattattatggatcaaggaacaccctaatttatgtttattatctcttctttatagatagctattttgctacctaattttttctcttttatgattgggagaaaagaacaacattaaatttcaagtttttcagtttcctggataaatgttacttaaaattgtatctcagatttcttataactgtattgtttatttctatatgaatcggcttaagtatgtgctaatcagtgtgtttggggcttatggtttttgttcacattaaagacttcagaggaaaaaacctagttacccatttggttatgccatgagatggtgtggctaatggaagaaaagaatgttctagcagaaggagcagtgtattcaaagaccactaaaatgtagtttgatgtaatacatttcttcatttctcccatgacatctagtaatcattcttcctaagcccaagtctcagactgtttttctatagttttcttgtgcctatagatttctagataaattagccttccctagtagtcctttgtgctctttatgcatatccagttttcctacctggtcacaaagaaggcatgtgactagttctattctttttgttataaatatgacctgtatcacctcaggtgacataccctatgtctagttaccaacgtcaggccctccagagtatttttttttcctatccagcctggtgattagcattattaaaaacagtgactactgctctgttaacctgcatccctgtatgactgcaataaacagggcttcccttcctacctgaaatagacatatagcatgaatgaaaactaaacttattttgtttcaaggcacagagatgggaaagtgtttctttttttcctgattgtaactacagagatgggagatccttaacagagtataatgtagcctattctgattgcataccttccctggaaaatggctcgttgatggagcttctgatatttaaacatttgatgataatattagtaactaataattatattttcaattatttcttaagcaatctgctcaatgttttataaaatatctcactaaattcttaatgttttcctgtgaggtaagaactatgatgaggtggcaacttgcctattttagtgcttattttcacttaatatttttattttacttactgacatagtctgttgattgagtaaagtatagttgatttaccaatacagtgttgtgttagtttcagatgtatagcaaagtgatattcctttccaggtttcatttctattatagcttattacaagatattgaatagagttcccagtgctatatagtaggtccttgttgtttatctgttttgtatatagtagtgtatatctgttaatctaaattcctaatttatccctcacctcaggtaactctaaatttactttctatgtctggaagtctgtttctgttttgtgaataagttcatttgtatcatttctttagatttcatatatcagggatatcatggtatcatatgtttactgaagactcttttgaatagtagtggtgagtagtttttgtctgacttacttcattaagtatgataatccctaggttcatctgtgttgtggcaaatggtattatttcactcctttttatagctaagtaatattccactgtgtatttataccacatcttccttatccattcatctgttgatggacacttaggttgcttccatgtcttagctattgtaagcagttctgcgatgaacattagggtgcatgtatcttttcgaattagagttttcatattttcctgatatatacccaggtgtgggattgctggatcatatggtaactctatttttagttttttaaggaactctgattttgttctccatagtggctgcaccagtgtacactcccatcacagtgtaggtgggttaccttttctccacaccctctccagcatttattatttgtagactttttgatgacggccattctgactggtgtgaggtgatacctcattgtagttttgatttgcatttcagtactaactagcaatgttgagtatctttttatgtgcctgtttaccatctgtatgtcttctttggagaagtgtctgtttaggtcttctgcccgttttttgattgggttgtttgtttttctgatattgaggtgtatgaatgagctctttatatattttggaaagtaaatcatcttcagtcatatcacttacaagtattttactccagatatagcctttttaaacttatttgcttcatcagtatcaaatttatgcttggcatctctatgtctatctgcatacataacttgtttcagtatggaatcatgttataatcttgaattgtgatttcatcagtctgctctgagcttacccagaatatagaattttttatattttcaggtagccagcacctataaaaacctgcttcttgctggaacacttaagtgctaggagtcaaacagtgattgatgtgtaaccgatctcaactttactgaacttatggcccttacaggcaattatgccccagttatttatttgtgacagtgttttcccacaaatctttgattttaggatgtggcacatagaagtgtttcccatggaaacagaaagtgctttgggataggagacttacagtggaagaaaattatgactgagttgtatcagaattagtagcagaagacatggtatgtttttaagatacgcaaaagtatttgcagttgaaagtcctgaatctctgctgcatctgtttcacatgatatgaatctgcattttcattcagttttattcctactccaaatataatttcatttaaatcagttatatgtatgtggcaaaaatttgatctgtttcctaaagactagtagtggttagtagctgttgaactttcagtttaaaaactaattaaattagtggacaattttatggacagtttagaaataattcatttatgtgctgttttcttttgtgctttgtcaggatcctggaaatgttagggtttacttactcttaatcagccataagaaatggtttgattcacttattctgttttagataattttaatttccaagcttaactcaaagtcaggacattttctatttgttgatttcatgagtaccactttcctatttttatttctcactgtctactggccaaagtaattgtgaaactatgttcaacagacttttaaatcctcaacctctttcttaagctcagaaaagttccagatatctgtcttgcccttgattataacccttcttcagccttctcaagtaaaactttcttcacaacttacagacttaaggacgaagattttagtaaggaatgcctgtaagaattaataatatccttgactgtctagttccttctagtccctctcccgatttatgggcagaacaaaataccaactggtcaccgcctctctgcttgcactcaggcagttgaatgtactgctctgagtttatgccacaaacctcaaccaggtttcaacagtgtctggcagtgctgctacttcttcttcactttcccttttaatactgtgtttccactcattgcaaacctctcacagcccccactctcatctgtggacctcacctcaaactttattgagaaatcagatgcagctgtcatcatctttgcatcactgtatctgcaaacctacctccattggtcttcaggttctcagtcttcctttctcttgttactaagagaccttccctgccagtctaattccacttcttgtgactcaggttccatctcttcttagtgtctctggggcttctttcctgcagctggcatctctttacacatcatcagtttctgtcttttggttggattttccctccagcctacaaacatactctattatctgccacccctgatacatatgcaaatacatataaacatgatgacaaactatatacagatacttatatttcattcttctgtcttctgtcttactatttcttgttcctgttcttatctaataaattatcttcattgaatcaagtttttctcctacctcagtgtctgtttcttctcaagcatttttgtggactctattctttatcaatcttctcaatttgggtgggctctagggttgagtcttctttgcctatactctgttggagatttccttattagcattctgtgacacctaaatatatatcctgcctcatagttcttcctgagtgctgaaatgcatagccaactgcctacttgatcagttaactaacctctcttttaggtgatataatacttgatttcttcccctagagattccccacttcagtaaatggcgtcactgtccatcctgttatctactcaaaattttgaggtcagctttgattcttatttctctcatatctaatttaacaaacacctctgtgccacagtgttctcatctataaaatgatatgataattgtcagtaataaaatatcagattatgacacacatacgtctgcttttgaaaattcaaattctcatatcttagaataaaattaaagcaacttaccatgactttcaggactcttcataaccacaccttatgtctagttgttctgactgctttttgttatcatttttgctatctttaattctccactttaaaacataactttttatgcgatgtctttttggtagggggtgggaaagcagcttcagtttttgcttttgcttgttttgcggtattaaaatgtaaagacagtgccaaattttaaatcagttgatgttttttcacctagtgaatcacttatctttataaatagacctactatgtttttctggttttgtaggagattggtaaaaattcctagaagtgaaattgctaagttaaaagataggagtgttttcagacctgtgaatcctattgaggtaaatttttgagacgttacatgaccaaaaaggtttcatttaccctcatgcttgattggtagtttgcctgagggtagaattctaggttcagatcatttttatataggacagtgaaaacattactccattgttttttctgtttaacagctttattgagatgtaattcacatatcacagaatgcatccatttaaggggtatatttcagcagtttttaatatggtcccagagttgtgcaattgtcaccctagtcactgtagaacatgttcatcaccccaaagagaatcccccagacagcagtcattccccattcccactaatccaccagtcttaggcaacaagtaatctactttctcttttcatgttgctgatcaaaagtctgatattaattctagttattttataggaaccatttagggttttcttttcaactctgaatttctgaaatttattcatggaaactaggatttattcagacataagtcttattttacttactttacttaaaactttataacctttttattttgtactgatatatagtcaattaacaatgttaaaatactttcaggtgaacagcaaagggactcagccatacatatacatgtattcattctccatcaaacccccctcccatccaggctggcacataacattaaacagagttccctgtgctatacaataagtccttattggttatccattttaagtgcagcaatgtgtacatgagcttcccagagtccctatcattccaggatgtctgactctaggtgagtgatcacaccatcatggttatctgggtcatgaagatctcttttgtacagttcttctgtgtattcttgccacctcttcttaatatcttctgcttctgttaagtccataccatttctgtgctttattgtgctcatctttgcatgaaatgttcccttggtatctctaattttcttgaattttcttgaagagagctctagtcctacattaaaagagatctctagtcctgcattaaaaaatacatatagagtactgagttatatttgagttagattattttgtggctttatttttttgtttttgtcaagttttgacacctagattttgctagcttcataaaatgatttgaaacattttcttttttatatttactatcatctattagtgtgtttccttaaacatttggtagaaaccattgatttgaacctgataccttcttgttgggaagaggggcatcagtgcctatagtttttttttctgccattgtcacccttcatttctttccatagcagttatgcattatattttggcatagacttttttttttaattcaggttttttggagagtgaattttgccgtttgtaaagttgtgagacatgattggttgtttactaatatttagttcagtttaattgctcagtcgattccaactctttgcgaccccatggtctgcagtacaccaggcctcctgtccatcaccaactccaagagtttagtcaaactcatgtccattgattcggtgataccatccaaccatctcgtcttctgtcatccccttctgctcctgccttcaatctttccccgcagcaaggtcttttcgcatcaggtggccaaagtatcggagtttcagcctcagcatcagtccttccagtgaacattcacgactgatctcctttaggatggactggttggatctccttgcagtccaagggactctcaagagtcttctccaacaccacagttcaaaagcatcaattctttggcgctcagttttgttttatagtccaactctcacatccatacatgaccactggaaaaaccatatccttgactagaaggacctttgttggcaaagtaatgtctctgcttttcaatatgctgtctaggttggtcataacttttctttcaaggagtaagtatcttttaatttcatggctgcagtcaccatctgcagtgattttggagcccccaaaaataaagcctgccactgtttccactgtttctctatctgtttgccatgaagtgacgggactggatgtcatgatatttgttttctgaatattgagctttaagccaactttttcattctcctctttcactttcatcaagaggctctttagtttttcttccttttctgccataagggtgatgtcatctgcatatatgaggttattgatatttctcctggcaatcttgattccagctgtgcttcatccagcctagtgtttctcatgatgtactctgcatagaagttaaataagcagggtgacaatatacatccttgacgtactccttttcctatttggaaccagtctgttgttccatgtccagttctaactgttgcttcctgacctgcatacagatttctcaagaggcaggtcaggtggtctggtattcccatctctttcagaattttccacagtttattgtgatccatacaaaggctttggcatagtccataaagcagaagtagatgtttttctggaactctgttgctttttccatgatccagcagatgttggcaatttgatctctggttcctctgcttttttaaaaagcagcttgaacatcaggaagttcacggttcacatattgttaaagcctggcttggagaattttgagcattactttgctagtgtatgagatgaatgcaattgtgcagtagtttgaacattctttggcattgcctttctttgggattggagtgaaaactgaccttttccagtcctgtggccactgctgagttttccaaatttgctggcatattgagtgcagcactttcacagcatcatctttcaggatttgaaatagctcaactggaattccatcacctccattagcttagttcatagtgatgttttctaaggcccacttgacttcacattccaagatgtctggctctagtgagtgatcactccatcgtgattatctgggtcgtgaagatcttttttgtacagttcttctgtgtattcttgccacctcttcttaatatcttctgtatctgttaggtccataccatttctgtcctttattgagcccatctttgcatgaaatgttaccttggtatctctgattttcttgaagagatctctagtctttcccattctattatttttctctatttcttgcactgatcatgcaggaagcctttctatctctccttgctattctttggaactctgcattcaaatgggtatatctttccttttcttctttgctttttgcttctcttcttttctctccttctttgtaaggctttttgcttctcttcttttctctccttatttgtaaggcctctttagacagccattttggttttttgcatttctttttcttggggatggttttgctccctgtctcctgtacagtgtcatgaacctccatccatagttcatcaggcactctgtctatcagatctgatcccttcattctatttctcacttctactgtataatcgttaagagatttgatttaggtcatacctgggtggtctaatggttttccctactttcttcaatttaagtctgaatatggcaataaagagttcatgatctgagccacagtcatctcctggtcttgtttttgctgactatatagagcttctcaatctttggctgaatataaccaaagaatataatcagtctgattttggtgttgaccatctgttgatgtccgtgtgtagagtcttctcttgtgttgttggaagagggtgtttgctatgaccagtgcagtctcttggtagaactctattataagcctttgccctttactaatattacttggttttaatttctgtgttctgctgaagacataaaaaaaggatgggaaatcttctagtacctttcttgaaattttttgtttttaattctttcatttcccttttaggattgtaacaatttttcttgttttttcaagaagacattttaagccaaaactctgtgtctgctgttaactttacaatatcttattctactttttaatgtatcatcaaagtattatcatcatcacagtttcttttttcttattctttaggaaaatctgaaagagtttgcttgctcagactcattttttctaattataactgagtgatcatagtgatttttcttcattctttggatataaaattacttttgtttggaagttaagaaacctgcctttcaggcagttgtggtttggccgtgcattatgtaaaccttagcattttctactgccaggaagaaaaggaatcagttttaatcggctcagtctcctcgtttctcgcctgctcttttccttctctaagttttttttcttttccctttctcccattctttgggtgaatggttttttaccctgactccgcgagttttatctgtggaactttaagaggggaaagaaaaaagagaggctgtaggtaatagagtacttaatttcttggactgtaaagaattactgaactaggattaatttttctctcttatcctattctgaagaaagcttaaatcagctccagcactactttgactacttgtaatgactaagacaccaagataagtgatgagggaataaaagattaataaaacatatttctgttttcaaagtagctaatagacatgaaaaacataatcagttttagcatatcaaattctgatgataaagcagtcctgccctgggtggtcagtgaactcatcatagagggagtttgtcattttctgaggtgaagaaactgtaagaaaaacagattttgatacaggacttggtggatagatatccagttaacttttgaacatgttaagtttgaaatactacttatcttaaaaagtatgtaggaatatacagtaggcacatggggaaaaataccgtggagttgagagaacagagctggatttaaaaatttggacttcatcagtacatatataaagccacaagattagataagattacttgggaagtaagtgtagctagaggaaagacatcctagtgcttcctggggatatgagaaattagccaaggattcataaaggaaaaatattgtaatatctgattatagaaaaaaactagaaacttctgtcatttcttctcaaactttaataaggatcattttgttaaagttcagtaagtttgaaatggggcctgagattctgctactcctacaaacttccagaagattgtgctgctggtagtctatgaaccatgctttgagtagcaagactgtctatgactaaagagacaaagtaaaaagaaggaaagactgcagcgtctgtagcagaataaggattaatatccagaataaaaggcatctataaactgaaaagaaaaaaaatagaagggagaaagaatatgggtagagaatttttcataaagaaatttaaatggccaatcagcgtgaagaatgctcaacttcctgggaaatacacattgaaacaagaagatcatgtttcccccattaagatcaggaaaaattttaaagtctgataatatacactgttggtgggattgtggggaaagtgtggactgataccctaacaggaggtatcttggtacttttgtccttttggaagaccatttgccataccatttgcacatttttaaatgtgcatatccttcagtccaggaatcctgtgcctcactatctaaaaggaacttctacctttgcccagaaagacatttcagagccatttagaaacattgtttaaagctgggagaggtgaaatctaatgtcctccaggaagaaattattaaataaaccatgtgcccttgtacatttaaaaaattatctcacatttttcattataaatttaagtaatttaagtggccatgatttctagagtatatttatgttaaatacattttcagtcacaccataaaattacagatttaaatcattcagtttatagagagtatctgtagacagtatatactgtagtgtaatttgcaaaaagcatgttctcacaccactcagataaattgaactcatttttcactaagaaaaaaaaataatctgattgcttatttatcttaaacatgtaatatgtgcctatactatgagcactagacttctgaattctcagttgggtggctagataaatgttaaggcttgaaaccttcccaggaatttgtttcactgataaaataaggtcttgctcttaatatctaccccccttttttgtcaaggaatttcccttcttttcttgtttgttaggtagtttgaagtttatatagctcagaagagtacacgttagtagatgcacttgagatggataagaattttacctttctttcacaaagtggagaattacaaagtagtgatttttaaaggagaggaagaaagaagaactggtttttaagcagattagttaggaagaatacaaatagacactggaaatctggaaatgattctcctaaaatcattcatatccacctaaccttaagttacctttgaagtttgaagccattgaaataagcaatgtcctaacattgtgaaatgaatattgtcttgtctgaacttatgatgttgtaatacagtcatttaaaaggtgtaaaataggactaccttggtggtacagtggattagaatccacctgccagtgaaggggacatggatttgatccctggtccaggaagattccacatgccacggagcagctaagccctgcagcacagctgctgagcctgtgtgcctggagcctgtgttctgtgatggaagccaccgggaggagaggcccgcacgccacagtgagcagtggccctccactcaccccagctagagaaagtctgtgcatagcaacgaagtaaaagaaagacatgaattaattaattaattaaaaccaaaactatattaaaagaacaaatacttaaaagcactaaagaaaataaaagcaaaatacatacatattgacatggaaagaattctgaggcatgttgtttggtgaagagagcaaatgttgagaatattttaacatgtaatatttatatatatttgtctattttatatatgtatgtatttttgttttttatttgagtaaaaagttatggaagaatgtataccaaaccataaacaggacttactttttttggcaggacacccagaaatatggggaatgtgaaaaagagatttttattgctcgttcctgaatactcatgtattacttaaatgttttataattgagaaaatattgtattactagtgtaataaaaagtttaaatcatcttgagatctctaagctctaaatttcaaggaacactgacagttacaataatacttcagcaggaatattaagatatttctaattcatattctaaatgatttgtatttaaattcttttaaaatattttttaggtgtggaatatcaaacaaatgattaagttgacacaggagcatatagaggccctattggacaaatttggtggggagcataatccaccatcaatatatctggaggtaagcttttgagtgtcatatttgtagtaattttgaggaaaagaaaatgaacttatagacacgtttgtattggtaatatgggttattttagggagtgggattaaaaatagatattcgaagagagaattagctttgtctttattgtactctttaaggttgtttaacttgttaaaataaatatgtagtatttggtaatttggaaaatagcaaaactaaagaagaagttgtatataaacttcaaaatattaccctggtttaaaagaagaaaaaattattgaaaaaagagaaaacattcttttctggaggccagcaaactagttgctatattagaaaatggggagaattttgcagaatatcttgttttcagaacaaatccccccaagtaggtttttgcttcctcatgggtaaaatttacaaaatttgagtatctcaagattgcttaacgttacagtttaatagtgccttgaagcttttgtatccagtcttgaacatcactgtaagtttatagattagttattgtttttaatcctgttaggtagcagttactgtaataatcacagctatgctttcttggcattagtttccttatgtaagtcactcaagttccacagcaaggaagctgttacagaatcgaggcagtcaggctccacagcccactacttaccacttcactatattgccggtctccataaaagctagctccaactataagcaccagtcatactgggagataaccctaaattacaaatgatcaggttaccatttgccttcaaatgccagagattttttaggcatggattgacagactcctaaaccaaaattctagtaatctaattacttttaaagggtaagttaaatcttcagtatttcaagagaaagtaagtttgtatatttctaaaataaccttgaaagtttggaaataactgctaataaactattctctctttatatggctcatcacagagcacactgccagttagtaccagtgctaggactggaactcatacctctgaatactagtcagtatattttctaatatcacatgctctctgttttacttttgtgtgtgaggagaacaagcaaaggagtcataaggaggcaaatagtcctggtgaaaatggtaattgcttgttagtcagaattagacaacttaaccagcagtttttctgccaaccatttttgtgtcaggaaactttccccaccctcagatgtaatacatttgcatcaatgacatggtttcactatagcagggattcattcgcccctccacacacatactcttcaggctttttactattaggattatatctaactaggacagtatagggctacccaggtggctcagtggtaaagaatctgcctgcagtgcaggagacgcgggttccatccctgggttgggaatatcccctggagaaggaaatggcaactcactccagtattcttgcctgcaaaatctcatggacagaagagtggtgagctacagtccatggggtcacaaaaagtcagacacaacctagcagctgaatgacgacaacagaacaatttacagcagactatacctcatagattgtatcattagcacatagattgttactgacaggtactaacattacacagtttctctgtagaaagcagtataacatagtggttgagatgaaccatggagttacacagaccctgtgtttgaattgtagctctgccttaatttctgcagacaagttacctaacctccctatacctcacctaatcggtaaaacggaaatatatcacacatggtaatttaaagactaaattttgagtttatgattatgaaataagtgctctgtaaatcttttactcatttattcaacaggcaattattgagtgcctgctaacatttgtacttgtttaggctctggggatatgtatattaaaaaaaaaaaaatccccttctcccaatgtctgccttcagatagcttatgttttaatcaagggggagtggtttacagaaactaaatacataaataagttaaaacattgaacttaaccaccatttgatttactatgaagaggagcctggccggaattgaagttccctcaaattgaaagtttggaaataactgctaataaactattctctctttatatggctcatcacagagcacagaggaaagttgaccaggccaagcaagagaaaagactgtgggtcctgatatttgatggcccttaagtgagtaatctactgattacccactgagacccaccattctcctttctgtctcgatgaattttgctactctaggaatgtcatataagtggaaatctaacatatttatcctgtaactgactgatttcacttagcataatgtcttcaagcttcatccatgttgaagaatgtgtcaaaagtttcttcctatttcaggctgaaaaacatttcattgtatgtttatatacctgtatataatataatgtatattatccatttatctgttgatggctaccatcagtggttggttgtttccaccttttggttattgtgaataatactgactttttggggtgtatatacctggaaggggaattactgaatcgtaagataattctatattaaatttttaaaggaactgccattctgttttccataagcagctatgttttgctttcctattaacaatcctttatatctttgctaagacttattttctgtatgtgtttgtgtaagaatagttgtcctaatgagtatgaagggatatctcattgtggaaatgcagatctccagctttgttctttttcaagattgttttgactatttgtgatcccttggattttctcatgaatttcaggatggtgtttctctgtttttgcaaatacattgggatttgggtaggggttgcattgaatctgtagattgctttgcatagtattgacatcttcagggttcataactcttaaatacaaatgaacagttaagaataaccagatatttaaagaaagcttttaacaggaaagatagtggcagaaatggtcaaaagggactcagaaacagtgcagagaacagaagaaaatttaaaatcactataacatcaaagataagagaagatccataatctcttcttgcttcatggttgtattaaagaagcaaaagtattaaagaataagaaagagctcttggaaattaaaatagtaggagttaaaatagtatagtaggaaatttatatatgtgtgtgtatctgcacgtgcatataaacagacagataaacacacgctatatagttaaggacatcttccagaaagcagaataaaacaaagatagaaaatagtaaggaaagatgggaaaaattagagtaaatctaggaggtctgcaaaattaaacagcaggctgtccaaacttgttttgaatttcttctcccataatgagaaacatggaggtacaatattcaaagattggttctacagctcaaggttgttacacactggcatagattgctaccatccttttggtttccatctgcagcagatctgagaattgtactcttaacacaatacctcaagtccagaagcagggatcacagatactctggtgtactgagttatttcatggaggaaaaccttcccctcaaatcccctacaagtctttacatctcaccaaccagaatggggttacataattcctagactagtgactctgcttacattttctgaaataagaggctaaaaagtaaaaattttccggtgttcacagtctggcttcagattagtttgtgcactggcagatagaagttgtgctctagttatttcattacatagcatttccaaagaaaccattttgatgtttccatagaaagttaaatctttacctatccccacatctcttcctcatagcaaaacagaatgaaatcagttatatcaccatcaaaaatcctcgtgactttctcttttctgtgtactaatttatttaaaagcaagcttttaagttgtagattttctcctactggcatatgaataataattaacactctattgattcccttgacgataactgcagtgaaatgagctgtcgtactctaaaagaatttcagttttgtcttcagtctttggttccaatctcttctttttaccatcacacaaagaaaagatatttcccctgaaagtcatttcccagaatttcttatttttgtcccagttcttttatttttactcatctgacaaattatttgaatgccttctgtatgtaagatataatgctggatgcttttctagaagtagatttctgtttctgaacctgatttattggattccagaagtggaagggtggagaaggcagtggcaccccactccagtactcttgcctggaaaatcccatggacggaggagcctggtgggctgtagtccatggggtcgctaagagttggatacgactgagcaacttcactttcacacattggagaaggaaatggcaactcactccagttcttgcctggagaatcccagggacgggggagcctggtgggctgccatctatggggtcgcacagagttggacatgactgaagcagcttggcagcagcagcagaaatgaagggaataaagtatctggaataaccctccaagctaccactgagtttatgtgtatgctcagatcccctgcagacagacagtaaagctcctaacatttattgagtgcttgctatgccaggaactgttacaagcatatagtagatcatttaatcctcaacctgccctgtgagttatatttaatactcatttccattttatcaaagaagagactcaggcaaaaaggattttaataataacctgaccagctttacacaacttgtaaatggagtagccaaagtttgaagccagacattctgaatttagaatctgtatttttttaatgagtcttctgtaactgcttacatgttccccaagtgtatgtcgtctctttttttttttcctatcagaacctgtgctcttaattgctttatcattattattatgcttacagcctttctgatctttagcctgtgcagaacccaagataatgcaaagacatttatcgaaatagatactgtagtgaaaataatactggaagctaggtgcttcctgtggaatgcagaacagttcattaattatcagttgtggacagtttgaaagatgttgtatcttgtgagattaagttcaataagaataaatataatgaactctaatgataaaaattttttattccattgttttttcctattatgttttaactaagtagggccttaattgtcttcccatttttaatggagaaataattcatgaactgtgattcacttttttaaagtatacagttgagtaatttatagtatatgcacaaaattgtacggtcatcaccatcatataattccaaaacatttttatcaccccaaaagaaactattggcagtcattctctccagtccctatcaaccacttaacctaattttgaacattttgtgtgaatgaattccaccaagtcgtagcatgtaccattcattccttttttggctagtattctatcatgtggatacatcacattttgtttatccattaatcaactgatggacatttagcttgttaccacttttgggctttcatgagtaaagctgctatgaacattcatgtacaagtttttgtggtagacatgttttcagttcttttggttatgtaccttgggatggaattgctgtgtcctttggttactctgttttaactttttgaggaactaccaaactgctttcagaagtggctgcaccattttacattcccacaagcagtgtgtaagggttctagtttctatacatcattgccaacttgttagttttcatttattattattattgccatcctagtaagtgtgaattggcatctccttatggttctgatttgtaattcagaagtaactaatgatgttaagcatctttttcatgtgcttattagccatttttatattttctagaggaaaatgtctattcagatcctttgcccattaaaaaaactgtgttgtctttttattgctgagctgtaagagttctttgtatactctgggtgagaaatccttgttagatttgatttgcaaatattttctcccattctgtgagatgtcttttttccccccccactcttttgatagtgtcttttgaagcacaaaagcttgaatttagatgaagtcgagttcatctattttttctttggttactgtgttttcgtgtgtcatataagaaactattgcctagtccggggtcatggtgatttacttctattaatgttttcttgtaagagttttttagttttaactctttttttttttttaatctttaaatggaggataattgctttagaatgttgtgttggtttctaccatacaacaacatgaatcagccataagaatacatgtatcccctccctcatccctcacacctttgcccatcctgccactgtaggtcttgctcttcctaaatgtatgatccactttgagttaatctttgaacatgatgttaggtaatagtccagcttcattcttccgcatgcagatattcagttgtactagtaacattgtcaaaaatcaattaaccataaatgtaaggcttttttccccctggactcttaatttgttgtgttatgtatatatcagtaccacatgtcttgattattgtagctatgtagtaacttttgaaatcaggaaaagtaaatcttccaactggttctttttcatgattgttttagttattccaagtcctttgtacttctttgtgattttaagatcagcttgtccatttctgcagaaaagctaactgggattttgataaggactgcattgaatctgtatatcaatgtgaggagtattttcatctaaataatactgtgttcttttctctacattcttttgtttttttagttcaaaaactatacttcagtttaaaaaagaagccattgaatgaacgaatggataaaaaaataaataacatgagttgtgccctcaggtaccttacagtttggtagagtcatgttgagaacctagtcaagtagtacattgggttagagaaaaagttcaggtttttctgtaatgtcttgtggaaaaatttgaatgaactaattgaccaacccaatagtagtaacagtaataatggtaagaactattactactaataaaagtattgggtttttgctatgtggtagtctctgtagtaactttctttactattatttatcttacttaatgctcacaaaattttttcacaaatgattttttttaaccatataaagaaaagtgtggtaatactataaagaaggtgaaaagaaagtactgattttggagtttatcaagcagagctttgaattggactttgaaaaatgggtaggattttgataagaaagaatgggattatggaaaagctacctcttgaagaaatgcctggtttctgcaacttcttgaagcaccaaaggaatttcattgatggtagtattgatgcttgaggtatatgtttatgcaagatgacccactcacattttcagggtaagaaaacaaaggaaaagggaaagttggaagataaaagaaaaaatggagataatgatgaaccaaggcctccgtagtgggggaccttaaccacccaatgctaaaattaagaacaaaaaaaggatggggaaaaatggggagaattgctcagtcaaagaaagaaaaggaagcttttatttgatggctttgatcttgagtaaatttgaatgtaatggtattttctgagtgaattaaaggttggggaatgaagttaggagccagagaatcatagaaaaggttggagtaaatgttgtgagcaatgtaatatgaattaaaaataagtacaaattttcatgcaataatatggaaaactaatttccatgaattgataatggaactcagtggccttgttttattattttctccagtaatatgtggtaacctgagagaaagaatgaataattgaatgatggaatttaccagagttggtatttaacaaacaagttggtaaaagaattaagaattaaccagatagtctaagatgttaaccagtggcattgttgaaatagtgagtcataaagcatggaaagaaaatagcaaagaaatctgaaaaactttaagagattaatattgaccattaaccagagtagtatggaagtgagatttaagaaatttaagacagtgggataagtgtgtgtgcacagcagtgtgggaggttcccaactgagatcttgtcatcatttacaatgcttttgttaaagaagaatttgtatctctgaatcttgtaggtagagtagaaataaatgcctttgtagataagaggtttagagaactttaagacaggagtgttataagagtaatcaccatccacactgaatgcagcaaggataatggggtgaaatgagccaaacaagatacaaaacaaggcggggaagtaagtaccttggtagattgcatctgtgagaagggagagaggtggaataagtaaatgttttgtatttaagaaagttactgataaatgcagtggaataatagattgtaatccacagtggagggaataatatattttaaaaaattaaggctaatgttttgatacagaattaacattctgaaaatttgtttacatttattacttttcctaagcttaactctgcgtagtaaacgtacctgctcagatgataataaggttatgtgatctatgcaaggaggaatttttgtctccttaggctgtatgtatataatcttcaaagggtaggaatttgtgttggtctttatttctgtggtttgagccccaagtaataccaggcacatgcatgctcagtatatatttattgaatgattaagtatcaataagtggatcatattgaaaaaagatgtccttaagtaattagcccatggaactgaaagctaaatagaaacatagctcagtagattttggactgatttggctataacgccctgaaatgctgtgaaacgttttggggtcagcattgggcaactattggattgtaaaacagagtgcttttttatgtagtttaattaagcccttcaatagctcattttagtattttcccttcccccctaaaaaagttatatggtgagatcagacatcaggtgtggtggcctatattgaattgaaacttctcctttattctcctctgaaagtattagtcactcagtcatatctgactctttgtgaccccatggactgtagcccaccaggttattctgtccatggaattctccggacaagaatactggcatggattgccatttccttctccattattctcctctacctgtgataattcttccttgcttatagagtgaagttcaggcttcaaagcatagtatatacagtctctccaagctgtcctttacccacttttctagtcttatgatttgtgttcgtattcttcacttaaattacacaaacatctattgatccctttgatatgtcccaggtattgtatgacaatcagctatactagtccgtagttttcctctgtcttaaaatttctaacctccttactgtgttaaaaatgtctcctatactacacagtactctcttctccccacttaattctatctatgtaaatgctaacattttaagcatccccccttccttactcttaccttgtatcaaaaacattctttctcatatacaacacaagtaaaaatgcagccatttgcttctctgcagcccagtaataaactctctaggtagtgggaaattttgtagccttttgtaatgtgtgtagtgttgcatctgtttcaggttggtagggagacgtggtggtggattacggtgtggaggggagagggtgattaccactgcagtaaatcaccatgggcatatgcattcgaatccattctctctcttaattttcaattattctattttcaggattcttcctgcttttagaaaatgatatcttatgtgatcatttgacctttcagctttagtaaaatgatagttctagaaacataccctgatgggtaatggtctcaaaatttcttgactacaggatgtaaaccaccttttcaaataaaattctattctgtaagcagtgtttgatgggaagggggaggtcataaggtatccagagtgtgaaaaagaaaatatttttaactaataactgtttcagagaaaaggtcacagttatgtatcctctaatccctgttgaggagactttggtggttatggtgagatttggcactgtgtacctttgcctgcctgccaaattgctttagtcatgtccgactctttgcaaacccgtggactgtagcccaaacggctcctttgtccatgggattctccaggcaagaatattgaagttggttgccatgccctcctccaggggatcttcctgacccagggattgaacccacatttcatgtctcctacattggcaggtaggttctttaccactagcgccacctggactgtgtaccttaggcttgtctttttgacagatctctcttaaaacctcatctccttttcagcctctctcagttagttagagagagactgagagagatgtgaaacctttcatacctataacttatctagaaaaaaatgctttgatgtagtagtttatcttatgttaggtgtgtagtttggaagataaattgtgatttggccagaaaatagctaacactaatttttttaaattgatattcatggctgttatggacatcatacatgtatgtgtgtgtgtcagtttctagatgagtgtcttataacaaaagatttatcaatttaaagataaaagtactaatttataatacttccagtacttattttgtaatttgtaacacaaaatcctgttatctagatttgattataatcaaaaactaaaatttcgtatttccttttgttactgtcaggaaaaagtccagattcaatgtaagtctactttattttataggcctatgaagaatacaccagcaagctagatgccctccaacaaagagaacaacagttattggaatccctggggaatggaactgatttttctgtttctagctctgcatcaacggacaccgttacatcttcttcctcttctagcctttcagtgctgccttcatctctttcagtttttcaaaatcccacagatgtgtcacggagcaaccccaagtcaccacaaaaacctatcgttagagtcttcctgccgaataaacagaggacagtggtgagtcagcttttaattcatcatagctttttcttcgtatttttcagaaagactagttgtgggaaatgaaatgtgatacccagtggtcatgcgaatggaagcatccatttaagcaagaatggaaaagacatagttatttggtgccaaagtctgtgttccttaagtggagcaaattgcattgtctttagtgtcgcttgtatacctgtctgccaagcttgaactacactcacgtctgagtattagtctagaatcagaattttgatacttaagcttgtttgttctttgccatagagaaatccctattcggatttattatcaaacgttggattcttagtgtgcttgacatttttctcgtttatataagttttgattgttgatcattatatcatcattggaatacagtactctgtaaataacctttaaagcagggaaatctgcaagataatgatagatggtctgtaatctcacgtgcagcaagtactgccagtggacataactgaatggaaaaacgcacttacctgcatcactcattttttataatgtatatggttattttgatagcaataaaaaaacatttcattaccgaatacaattgaagtgaaagtagttttttaatttttcccctcagatagcattagtaattcttcatagaagatgtttgccgacttacttatgctatagtggcctccagtggggtcagtttgttactgggtgaaacaaaggcatatgaatgtcattatgtggagacacaagactaggccttcagcctgtgccacaaaggtagttgaaacttatatcctcacataatctgaacctttgaaaagctttaccttcaataaaagggtgaattagaagaagatctgttcaccagcatatataaataacagtgaaacttttctgtctttgccagggccccagataaatgttaaagtttcccttgtgaattcttaactgtagatctgttcttaccatagtgtggggttcatcattatgttacctgcattattcaggaattctcaacccaagaaagaaatttttaaaaaaggttctggaatagtaatagcactcaggcactgggcagaaacaaatgtaaatccctcccttagcccatatagatcttatggaattcatacacataatacctcaatgacaaggtcaaaatcccaagttacagtatgcaaggaggaatagtctgtcatcagtgagttagaagacttaatagcagcaagattagattcctaagaaggaaccaaatagaatttctaggtggccttaaaatttaaagtggatgacacttatcatctctgaagtattattgctaaaaataattgtgtcgaatgttaagcttctagtccttccactttataagaaggacaagaagtaaagggaaaagttaagcaccatgagaagcagacacattcgaaagatggacattccctaagacagcctggactctcaattaatggagaataaaacgttggagattattctacactaaatagaccaaacaaaccaaatagaccaaacaatagacaaaacaaccaaatgcattgtgtaatcctggtttgggactagggtgagaaagagctgtagaagtccttcttgagatgggatatgtcaaatattggttgaatgtagtatgtttttatggaattattagtttccttaagtgtgataatagagaaaatattatgtaggaggatatctttattcttaggaaatatatgcttaaatgtttaggggtaaattgttatgatgcctgcaacctctctcacctcttttttaaaaataaaactgacatatagtaaagtgtacaaatctcaagtgtacagctcagtgaccttctaatctgcggacaaagattatagaacatttctaatgttgagagtgtactcttgtgctccctcaattgagtacccacctttatcaataaatttagaacttactttcaaatggtatgatggaaaacaaaatattaaagagagaaaacaaatatggagaagtaattatcaagccagttacagcatattacagacctagtgtaaatatgctgtatagaaatcaaatatttatttttaaaaactcaatgggttaatttaaaagtagattgaattcacctaaaggaggagaattggtgacctctggaaaacagagaaagagagttatagaaaatatgagaggttaataggtatgaaggatggatagaatagtttcatcatatgcctcaaaggagaaaatgagaacagaaaaaaagaatgggtttcctgatggcttggtggtaaagaatccacctgccaatgtgggagacatgagtttgatccttgtttcaggaagatcgcaaatgctgcgtaacagctaaccctgtgcaccacaactgctgagcctgtgctccagagcccagggaccccagctgctgaagccctggtgcctcagagcccatgctccacagcaagaggagctgcctcagtgagaggcctgccactgcaagtgaagagcagccccagctcaccactagagaagagcctgtgcagcaacagccataaataagtaaacagatattttttaaaaaacagaaaaagaatagagcaaaattcaaagaaatgatggctaaccttcattaaagacacaaattaaggatttgagacgcataagctttaagttgtttaagtaaatttgaattctttcttattagatgtaacagaatgaaagaatattgttctaaaggcacttaggaaaaattacctataaagaatccaattagattatcaaaaaatttctttatagcagctatagaagccagaagacagtagaataatatactcaaagtgctgagtgatgctgtaagttacttagctaaagtatgagtttaacttattggtacactatgagtcagggcacagtaaagcctttccagatgaggagtttacttttcccaagctctacccaaagggactacttggaaatgacttagggagaaaactgaacacaggaaggaatgaaaagtaagaattaaatgtaaaaatgtaaacattctaaagtaagaattacatgtaaaaatttgaacacagaggaaggaatgaaaagtaagagttaaatgtaaagctagttttgtacaagaaaacacaaaggaaaatattttgtgacctggaatttggtaacagtttctaaaatatgacaccaaaacacaatccctaatgaacatattgataagttgtactttatcaaaattaaaaacttctcctctcctaaagactgtattaagagaataaagagacagaccacagactagtagataatctttgcaaaatatatatatctgatcaaagacatgttttcagagtatataaagaactcttagaactcaacagtaagaaaacaattaagtggacaaaagatttgaatagatacttcaaagaagatatgtggatggcaaataaacacataagaagatgctcaacatcatgggtcattaggaaaaagctggttaaaggcacaaggtaccaccacacacctattagaatgactaaaatgaaagagtggccttaccaactattggtgaggatgtggaatggaataactgaattttcatacactggtgataggaatgtataatggtataaccacttttgaaagcaatttgaagattaacttaatgttttaaagtcttttagctttaaagtctcaatagcttttttttttttttttttgcaaaaataaaaaaatccaccctgaaattcatatggaatctcaaggaatcctgaatactcaaacaactttgaatactaacaaaattggaggtctcacacttcctgatactaaaacttactataaattaataagtaaattattttggtactgatatagacagaccagagaaataaatggattacttttaaattatttctttttgattatagccttccttcatactcctattgagtatgaagtgggactttgttgtgattttgatatacttttctctgttggctgatgatatcaactggcttttctatatctttcatggagaaagtacttttataaatagttttgcatgacgtgtgcaaaactgggcattacccaaatggttaaataagtttggtatatctgtcaaatgaaatactacttagtagaaagaatgtattactagtacacacagtagcatagatgactctgaaagtaattatgtcaagtgaaaatagccagacaaaaatgactatatactttataattctgttataaaagtctagaggaaatttccctggtggttctgtggttatgacttagcactttgactgtcacggccccagggttcaatccctggtcagggaactaagatcccacaaggtatgtggtgtggccagaaatagatatgcagctagattaagcagttacagaagatttgaacaacatagataacaattgtatgtaatagacatgtaaaccttgtactaatcaatgaaagaatacacgttcttttcaagaatgtatgggacactgaaaaatttttttactgcattttaggcaaaaaagggaatctccacaaacacaaggtatgttttttgagcataatgtaattaaagtagaaattagtaacaataatgggaaaccacatttttagagatttgaagacacttctgaatgtcatatgtcagagaaaaaatacgaaaaaaatcctagtcctatgtaaattttattcttctgtaaaaaagttaaagagaacatttcctaactcatttatagaatttgtgtatcttcgttctaaaaccaaagatcatttgataaagaaaaactaaagttaatctaagaacatatttgcaaaaatctttaatgaaatactggttaactgaatcttaacagtgtatatatttttaaaaaattattcttctagaagtgcaacaattatttttaaaaatcagtgcaggtctgggatttccctgatgatgtagtggttaggactccatgcttccactgcagagggcatgagttcagtccctggttggggaactaacatcccacatgtgtgtggtatgccctgctccaaaataatcagtgcagttcttattagcatattaaaggaataacagtgtatggatatctctagatacagtaaacaagatatttgatgtattgaaaacctttttgtaacaagaaagaaagaaaaaaactctgtaaacttggaataaaagacaacttttttgataaagggtatctatcaagtatgtctaaaggattctgcattctcattaaaattggaaacaagacaaatctacttatggagttgaatattctagccaatctcgatcaagacaaagaaataaaaaacataaatattaaaaagaaacaaaacttatttttagcaactaatttgtctacatagaaaatctactaaattattataataattctgcagttaataattagaacatgcaattttatttaaaaaaggatatcattgacaaaataatttttaaatgtttaaggcttttataaagaaatttgtacaactttattgaaagacatttgtagagagtaaagaaatcaaaaattactttgttcttgataatcttcctaaatatacttctcacccaaattaatcaaaagtacgtgcagtttctgcagaattctagggggatctcatcccagccttactaccttatctgaaaagttgattctaaaatttgtatggaaaaccaaagagctaccctagaggcctcgtctagggactgaccttttttagtgtactgctgccgctgctactgctgctgagtcgcttcagtcgtgtccgactctgtgcgaccccatagacggcagcctaccaggctccccatccctaggattctccaggcaagaacactggagtgggttgccatttccttttccaatgcatgaaagtgaaaagcgaaagtgaagtcgctcagtcatgtctgaccctcagtgaccccatggactgcagcccaccagggattttccagacaagagtactggagtgggttgccattgccttctccgcttttagtgtgaagaagtgtttattaagtgtttatttgaagtttggttctaataaaagacaagtaagaataaagaaccaaacttcaaataaacacttttagtgtgaagaagtgtttatttgaagtttggttctttattcttacttgccttttattgtattaaaattcacatgaaatgcatgtgaaacttcttttctaaatgttacaatgattgtttcatgatggtattagaggtatttattcttccttttcagaatttctaacaaatatgtttacttgaaaatttcaaaactgtaatttctttaaaagtaatttagagattttataagatactctgtatcaaaatgaatgtgtactcattatttctaaaaatgaaaaaagtataaacaaggtaagtgtaccttggtacagaactacttaagactatccaggtcatggattagatacagtgactaaaaagaataaatgtgtgtgtcctttgagatagttttgaatcatatataaaaacctgttaattgcaattatctggaggatggagacattgctgggggcaggagaaagggactgatctttttgccttatacttagccccttctttcacataatgccaagctacttgttttattatggttaaaattattgtttagaatgatcatatctgatttattaagtatttatttcattatagataattaaatgtttcaaaatacatttaaatacacatatcctgaaatgtggtgggactattttaatgttagggatttaagtattgggtcatggggtatgcccacttagaacttcgtaaaatgtacattttatgcagaaaaattgtaccggtttatattctccctagggtataagaaagacttccttttcccacaagaccctggtcaacattgagtgttaatgaaatttagatgttactgccttccaatgcaggaaacgtgggttttatccctgggttgggaagatctcctggagaaggaagtggcaaaccaccctggtattcttgtatgggaaatcccatggatagaggagcctggtgggctacgaaagagttggatatgacttagcagttaaacaaccgatctaatagaatttcaagtatattagacttgagataccctcattcatacatatttttcaatgtgttgtgttaacaacaataagttaattataaaaaaaaatctcactcaattttcctgaaatgtggctttttctaagctgactttcttgaacgtgtagtttaaaagacagaatttgcttattttattttttatatgtttactaaaatatcatttatagacatacagtttacttatttaaactatacaattttagtctattcacagttatgcaactgtcagcactaattttagaacattttcatcactctgaaaaagaagctgtgtaccccttatcagccactcaccatttctccccagtcttcccagtcctagccaaccacttacttcatttctacttctctagatttgcctgttctgtacatttcattccatgtaaatggtgtcatagaatatgtggtcttctgtgactggcttcttttgcttagcataatgtttccatggctcatccatattatagcatgtcagtgttcatgcgtttttatagttaaataatattctgtgtgtatatcaaaccacattttatttagctattacgaattttgttttcacctttggctattaggaataatgctatgaatattcatgtccaagtttctttgtggacatatgtctttgtttttcttggatatattttcctttgcaaatattcagatgattacattgaccttagatctttgttaaggtaggatgctagtttttaactaagatcatggcctaatcaaggacacttaattttggaatttggaaaaggcattaacttggttcttctgaaaatatctttttagtctttccatctataaaaattgaaacaatgctcccctacgcctttacctttgttgtttagtcactaagttgtgtcagactcttttgcaacaccacagactatagcccaccaggctccacagtccatggattttctaggcaagaatactggagtgggatgccacttcctccagaagatcttcctgaccctgggatcaaacccgcatctcctgcattgataggaaaattgtttaccacagagccacccggggagcccacctgttttcctttgtgaataggtaattctttcaggtggtatttgtatcaagaaatcttgtttctgcccctgtccctatacacccagattcccctgcatcttttaggtaactttttatttgaggcagtaggggggtgtgtgctgcatttctaaagatgtagcaagaagaaaatacaaaaatatattcttattttcccactcctcttcatacaacacatcatattgtatatgtcattctgtattttgcttttaatgttttgctgtgtttttaatgtttaatgttttgcttttaatgtttatgtgagccagcagtatagctatagattccattgtacagatgtactatagtttgccagttataatatactaaaagtaggcttccttggtcaaagagaaatatacatttgtaattttgataagatactttgaaattttgcttcatagattttgcttaattttgcactgctaccagcactataaaattcagaaaacttaagatcatggcatctggtcccatcacttcatggcaaatagatggggaaacagtggaaacagtggcagactttatttgggggggctccaaaatgactgcagatggtgactgcagccatgaaataaaaagatgcttactccttggaagaaaagttatgaccaacctagatagcatattcaaaagcagagacattattttgccgactaaggtccgtctagtcaaggctatggtttttccagtagacatgtatggatgtgagagttggactgtaaagaaagctaagcaccaaagaattgttgcttttgaactgtggtgttggagaagactcttgagagtgtcttggactgcaaggagatccaaccagtccatcctaaacaaaatcagtcctgaatattcatcagaaggactgatggtgaaactctaatactttggctacctgatgcaaagaactgactcatttgaaaaaaccctgatgctggaaacgattgaaggcgggaggagaaggggatgacagaggatgagatggttggatggcatcaccgactcaaccaatatgagtttgagtaaactctgagagttggtgatggacagggaggcctggcgtgctgcagtccatggggtcacaaagagtcggacacgactgagctgaactgaccagcactgtatgagatgcctgtttaccatagcctcaccaacagaatatgttgtcagacttttgtatttttgccaatttgataagtgaaaaaatatttgggcaagtttgagttcgcgtttctctgaggttgaacactttttcataattctgaatctcatttataatttgttttcctgaactctttcttttgcccatttttctgttggattggtcttaatctcaatttttcaggagctccttatgtatcatgaagtttattttcctgttacataagtagcagatatttttcccagtttgtatttgtcttttgactttgcttatatagtcattctcccagtatttgtaggggatttgttccaggaccccataatgcatcccctacaaatattgggggatgactatataaggataccaaaatccttagatgcctaagtcccttatataaaatggcatagtattaatatttgcatataacctatgtacatcctcctgtatactttaaatcatctccagattacttacagtaggcaaatttaaggtttacttttttggaactttcaggactttttcctaaatatttttgaccctcggttggttgaatccatgaatgtggcaccagcagagatggagggctgacggtagtatgttgtgtgagtgttttcttttggcttccagattttgcatcatagtttcataggcctgctccacttgagactgtaagggagccatgtttcttccagttcttttacggtttgtcccctccttccttcaacatttacatctttgatccatttggaggtgaccctaggatactgtatgaactgtggatgaactttcttttcctagattggttccagttgtcccagcatcaattagttaaaagttcatctttaccctattactgatgctgcctttattttgattttatttatgtgttgaagagtctgcttttggtttttctgtttcattccattggtctgtcagtctgttgaacaggtagtatcatgaagaaacaaaaatcagccttttgaagtggatgaaggacagattgatgactttcccttggtgataagagttggaaaccaaaattttgcctactgatggaacatatatacaccttggaatcaacctgttcagagaagcataagggagcttagctatattagaatatggcattacaggactgcatgagagaaattaccaaagaaactgaagggtggatagccccagtccactaatgactttgtatgctgtattaaggaatttgaatttcaccctataattaactggaaaaatttgagaagattaaggttatatcacagaatgaaattctgagttcagtggactcctcagcagtccatagatgggcttgaagttttatgtttcagagagattattctaaggctttcatcaggttctcagaagtatctggcaagcaccatacacacgttaagaatacttttttcaaaaaaagatttcactgataacgggataggatagattgggtggggtttaaaactaaagatagggttgccacctaagaagtttagagcaggcagaatacaaatagcagaggggaaaagtcagcttccccttctgttcattatttctggaaggtatggacagttctcactattggcagtagttattttctgtgtatttcctgcaaacactgaattagtgaatactgaaaaactgctcctaggacaagtgcaggattactattataaatgagccaaagatggcctctgtatattgacccctggattgtttgtttcttcacagcaggctggggtccattaacttaaaagtcgtctggcatagggcacttgtttacagtatgagaactaggaaaagaaggcatatcaccttgattaacctcagctgctgctgctaagttgcctcagtcgtgtctgactctgcaacctcatagacggcagcctgggattctccaggcaagaacactggagtgggttgccatttccttctccaatgtatgaaaatgaaaagtgaaagtgaagtcgctcagtcgtgtctgactcttcgcgaccccatggaactgcagcccaccaggctcctccgtccatgggattttccaggcaagagtactgcagtggggtgccattgccttctcgaacctcagctgggaagagtcaaatttttcagtcttctgggacatgcctgcaaaagcattgcaagtattgatttgggggttacaaataaattttaatgaataggcaaatttgcaaatacagaatccgtgaatttagaggatcaactgtacaaatctggtctcttgaatacttccagtgatgaacctactccctcaaacttttcccttgctggatagttttaacagttatattgagctaaaatctgtctcctgtttttctaatcttgggtcctaatttggctttatggattgttgcccgttgacatactgtttaaattcatctgtcttatattcactttcactcaattcactctggcataagagtcccaatttctttagaaacttctggtttgctgaataccttagtgatttaaaagagtgaaacctttaattttgttattaactaacacatcttgtctgtcaccccccactcccctctccgcctaaaaaccgaccaacctgaactcccattgcttcaccttagtctatctacactgtgtttgtcagttctttttcagttttaaattattaaaattaataagaagggagatgagtcactggcagaaaagaccaaggcagagataacttcaaatatataggaagattctttttctctctcttttcgatgcctcttctctcttcactcctaatgtcttctcttcttctccttaagttagattcattctatagccagattttctcagtgtactagggaagataaccattagggaatccatatttctgtcttcttggaacttgacaataggaaagaaacttctgtcaaccagagtctatctgtcagtgaaaggaagaactgtagtactgttggggtcatacatctagccctggatctgggatatgggaaactaattagccagcttatgtcatgtgcagccagaagagcagtgaccctggattcataacttctcaagtaccatgtggtttttagggaaaggtggattcccagaggaaataggaatgctaaacaacaaatatcagctgtatacattaagacaaatattctcttctatgtttaggatcagtaagagatctcttaaggaccatgataatgcttgaaagattaccgttttcaactttgaacaatgttggatgaaaattgattttgctttaaatgttgacatttattatttctcagcagagagcacttagtgatctgttgcattttcttttcttttatgtgtttaagatattttgtaattttaataaaaaactaaaaattgattttgccttaagttggtgagtaataatagatgtttgagtcataattttccattaatattaagttagccctagaaataattttctgacatagtaatccatatgacattttcaaaatgttataaaggtaaattactgggttttgggttttttttttaagtaatgtgaaaaaatctataatttacttcttctgcctcatgtcctgcctttgtgataccctaggtgcctgcacggtgtggagtcacagtccgggacagcctgaagaaggcactgatgatgagaggtctaatcccagagtgctgtgctgtttacagaattcaggatgggtatggtttgtatgtgatgtgaaactttgtttaaaaaagggaaaaaaacatcagatactaaattttgaggttttctgtaagatttttacccaaacctagagtattaaaaatcaacctcagaaaaaaaaaaaaaaactaaattaattagcctagacaagtctggtatgccctttgaggagtgaacattagataattttgtatgatgatggtgtttattattctgataaaatgactttatatggagtttaagattcttaaaattttgaaccattttctctgtttcttatttgaataatggactctttcccactcctgtttttaatataaactcatagtttcaccaaagacttatcaaaattaacattttatattgaattatttttcagaaagcatgaaattatgccatgaccccacccctgccattcccaattttgaatccatcttgaaaagaaaaaaagagatctcctttttgggggcatattgtcccttgagtactctttttctttgaatggataggtaaatccatacctgtgattttttttttttttttttttttttggaccccaggaacaatccattttctgctgttgtaggtcttttctggagctgacttgaagaaaagagtacatctctttaccctgctgtttgtccaagagtgatacatttatttggggtaaacttaaaaattaatttattgccatttaaatttctaacgatggaagactagggagccaaaactccctcaccattactagcccctcaataaccaattttcatatcttcagcatgaggtatatgaagctttttaggtatgataaccaagaaaggctgtgtctacgcttttcagggagaagaaaccaattggctgggacactgatatttcctggcttactggagaggaattgcatgtagaagtgttggagaatgttccacttacaacacacaactttgtatgtactttttatattttaatgtcaaaaatcgtcaagttctttgagtttttatttaaagaatgaagtatgagatgaataattttggcattgtttttttacctaagttgaaaatcagttttattctttaaaaggaaaaaaaagcaccacatattaaagaggtttttttttttaatcattgtactttgtctttaattttaaaaagtaatagatagtcatttaaaaaatttgaatggtatgaaagtatatcaagtaaaaacgtggaagtaccctaccagaggtaaatagttgttaataattgattattgtgtagtcttccaaagtctttctgtataaaatgtgtgttcttatatctgcaagcccaaaatattctttcttttttccttccttcattttccttcattattttccatttctttcctttttgaaaaaaaactaaaaatggaattatattttgtatgatactcttttgtaaaaaagtgttaagcacagcatcataggcatctttctatgtcattacacctagctttataatgattacatagtagtccataagaatatgcattcagtgtatttaaccattcctctttgacatttaagttttttttaaaaaatccattctacacatggtaaatagattctgcatacaccttgacacacttgttaaatgtttctgaaagatagtgtgatggaagtggaatagctctccttgaggactgaagaaagacagatgttaaagctctccttccatacttctccctttatctgtttttttcatttgccagaacctagcctaagctttggagaaggcaatggcaacccactccagtactcttgcctggaaaatcccatggatggaggagcctggcaggctgcagtccatggggttgctaagagtcggacacgactgagcaacttcactttcacttttcactttcatgcattggagaaggaaatggcaacccacttcagtgttcttgcctggagaatcccagggacgggggagcctggtgggctaccgtctatgaggtcgcaaagagttggacacgactgaagcgacgcagcagcagcctaatctaagcgtctccagtggaacagtggaacctctctacctcggagataagggtacagttcccagagcttgagaacctgtcctctgaatgagtaggcagcagccaagattagaatgatctataaggcaggagtgcatttctttcttttttgtgtatgaaatttgaagtgtagtttatttttctagatggatagtaattgcttcccttttggcatcaagtgttttcccttgtgcctttgtgattagaacagctgggttcttctgatttcccagggggttagtgttttgggggctcctttagtggtgaagaatgaaattgggtttgtgcttcattagataaggcatcttttggacaagtgtacaatggacctgatgtcagtcagatttaccatgaagcacataggtttataatcatgagataaggcattcactagtattgattttgttttcaacttgtagaattttgagaagataaatcttaagaatttttatttcagtttttaggaattaaaatatttgtttacatttcacagtgatggctatcctttttcttagttattctccttaattaaaaattggatatgagaaggtaaaggaagacctaagttaatgaccttgaagtagtgcctcaggcaggtctttgccacaaaaggaaaatgaaagcaagcttttttggatgtgagagttggaccgtgaagaaagctgagtgccgaagaattgatgcttttgaactgtggtgttggagaagactcttgagagtcccttggactgcaaggagatccaaccagtccattctaaaggagatccaaccagtccattctaaaggagatcagtccagggtgttttttggaaggaatgatgctaaaggtaaaactccagtactttggccacctcatgcgaagagttgactcattggaaaagactctgatgctgagagggattaggggcaggaggagaaggggacgacagaggatgagatggctggatggcatcaccaactcaatggatgtgagtttgagtgaactctaggagttggtgatggacagggaggcctggcgtgctgcaattcatggggttgcaaagagtcagacacgactgagcgactaaactgaactgaaagtgctgtagatacacagaatagagattcctagaataaatgttttaattaagaattttcaaaaacaaaaaaattttcataaagactcttaattactatatacgtttaaagtgctctgtctgtgtgtgtgtgtgttagtcgcttaatcgtgtccaactctttgcaaccccatagactggggcccactaggcccctctgtccatggaattctcctggcaagaatactggactgagttgccatttccttccccattaaagtacagtagatacacagaatagagatttctaacctggcttttgaggagtcaggaaattttcccaaaggaagaattatcaaacctgagacctggtggatgaggaaagatgagtgaaagaaagactacactaaacaaagggaacagcaagaaagcatgttaccctttcagttttgagaaaagtttagaatggaggctacatacttggagaggtggatgttacagtgtagcatgtatagggatggagtaagctcatgttcaagctggttttagaaaaggctgaagaaccagagatcaaattgccaacagccgctagatcatggaaaaagcaagagagttccagaaaaacatctctttctgctttattgactatgccaaagcctttgactttgtggatcacaataaactggggaaaattctgaaagagatgggaataccagaccacctgttccgcctcttgagaaatctgtatgcacgtcaggaagcaacagttaatactggacatggaacaacagactggttccaaataggaaaaggagtacgtcaaggctgtacattgtcaccctgcttatttaacttctattcagagtacatcatgagaaacgctggactggaagaaacacaagctggaatcaagatttccgggaacaatatcaatcacctcagatatgcagatgacaccacccttatggcagaaagtgaagaggaactcaaaagcctcttgatgaaagtgaaagaggagagtgaaaaagttggcttaaagctcaacattcagaaaatgaagatcatggcatccggtcccatcacttcatgggaaatagatggggaaacagtggaaacagtgtcagagtttattttttggggttccaaaatcactgcagttggtgactgcagccatgaaattaaaagacacttactccttggaagaaaagttatgaccaacctagatagcatattcaaaagcagagacagtactttgccgactgaggtccgtctagtcaaggctatggtttttccagtagtcatgtatggatgtgagagttggactgtgaagaaggctgagcaccgaagaattgatgcttttgaactgtggtgttggagaagactcttgagagtcccttggactgcaaggagatccaaccagtccattctgaaggagatcagccctgggatttctttggaaggaatgatgctaaagctgaaactccggtactttggctacctcatgcgaagagttgactcattggaaaagactctgatgctgggagggattgggggcaggaggagaaggggacgacagaggatgagatggctgaatggcatcactgactccatggacgtgagtctgagtgaactctaggagttggtgatggacagggaggcctggcgtgctgcgattcatggggttgcaaagagtcggacatgactgagcaactgaactgaactgaagctcatgtgagtccttgtatgctctgttgaatatttggacttttcccaaaaatcattggaaatttaatgactattataggcaagggagcagtgtgactagttagatttgtggttttgaacaattgctcttagcatcatatagaaacaagtgtaagcctgtattctgcttagaaagggaaagaattgctctctctgcttctgtgtgctgaattttgttggctatgggaagaaggctgcttatgccccctggtttcatagtctgttacaaaggcgattccttcagtatttacctatatcccatgaatccttgggaattgatggggcggaggagacaggaaaggtagagaagcaagattagaacagatgccgtgggtccagaccttcccattttacatagatgctaacctcagacagccccaccccttacaaatcaatgcatgcaaattgcctgttctatggcccacatgagtttaccattcatgtctcaaattccaaaataagcataagttgtggcccaaaagaaaagatataccttcctgtacctgcttataaacaaacgtatacataccatgactgagcgacttcactttcacttttcattttcatgcattggagaaggaaatggcaacccactccagtgttcttgcctggagaatcccagggacgggggagcctggtggcctgccgtctatggggtcgcacagagtcggacacgactgaagtgacttagcagcagcagcagcacagaggtatatgtcactcagtttatgctcaaatgcctacccatattttctcctttctgcctccctcctttctcccttctctttttctcccacttcctttacatatagaagcaatcagttatgcatagttttcaagtatgtcagtgacaggaagaaggactgcaattgactagattaaagaaggaagagaaattagagcttcatgaagcagatttttaggcaatagaaagtatgagtatgtagcaaaaaagatgactataaagtgatgattcctatgaatacgatttatatttttctgtgctctaatttccagagattatgctcgagtataaaaagatgcttgccttagtaaataatagcagataaatattaaagaagcttttttttactgcttgtatatccagaaacaaatggaaaaagaacaaagctaaaaacaagtcagttgcctctttatatcttctgtaacttgatccatagccagaatgtgaagaaagcaagagttactcttaaaactatccaaatagtttatctaaatattctcaaaaagccagaatggatgatatgccaaggtaccattttctatgaaacatttcttttaataacattttatcctgataaatacatgtttattgaagagttttgtaaagtgagtattgaaatcaatttaatggatcatgaaaagcatttatatgtaatagaatggattagaaattctgatgtgcattatatagagagtaatattataagaatacaactatatcctgggtcacagtgtattttttttattattgtgtgtgattaatgttgtctgaaaacttgagaatatacagcagaaaacaaagggcaaaatagagtcacctatgctctcatcactcccaaataggcattgttaacatttgtcatttacttatccttcttatgttttctgcttattacataaacaaaccaaacagttgtaaacaatttctggttttgtctgttaccaagatagaacctccctagcacagttctgtttatgtgacacatgtttgccttctgacagggagttcctacatgttgccctgtaagcatcacatagaggaatgttcacagatacattgaggtgttctgatcctctaagaaactgataatttgttaaacatagttcttaccatcttttaggtgatgttcctgtcctttgtcctaagttaacaagtttagttaacttaggttaatctgattttcatataattttaattataaactagtttttttcttttgtaattttttaacacttaatcaaagtatattacattttaatcaaatatatatagttttaaaaatagtgcaaaggggttgccccaacccttaatagcctctagtgccactctatagaggaaatcattcttttccttttatttcttctttcttttttaaatttgaaaaaagacataggagacttggaaaatacagaacaaggttacatatagttccactatatattacaattatttcttaagtagataaattaagactttgagttgtagtttcaatatcaaactttcaaaaatcagttgaatggatggaaaagtagaaggatatagtagacctgaaaagctctatgaaccagttcaacataattacattcttaacttctaatggtttctgttttaagctcttctagtgattcttttcatgttattgaataataactttaggtcacaacttctgtgtcagttttagacatcatttactgattgccagttccattggaaattagatcatctgtaacatgacagcctttccccctctttcctctcctcctctgaagtgtttttggtttttgtgggttttttggttcctctgttccatacctttgtaactttaagcatgctattatttcttgtgtagaattattcaactggactcttcctcttcctttcacctctattacttccttttcctgtactcttatatagtaaagcttgaaattagtttctagtctttcattcatcccccatcttcttgacttctgagtttaattgaatagtgggtgggagataaattcatgtagtccatctgttaccttgaaccccctggtttcgttttagactcttcatggttaagttggttctcatgatgtaaacatagtaagtctacacccataccaccctaaatgcgccagagctcatctgatctcggaagctaagcagggttgagcctggttagtacttgaatgggagaccgcctaggaataccaagtgctattggcttgggcttccctgatggctcaggcggtaaagaatctgcctgcagtgcaacagatttgggttcgatccctgggttgggaagatcgcctggagaagagaatgactacccactccagtattattgtctggagaatcccatggacagaggagcctggcagtctatggtccgaggggtcacaaagagttggacatgactgagtgactaacaaacagtaaaaatttgttattttaaacaaaagagtaaataagttgatttctaaaaagattcttacagaatcctccatgatgttttactttgcaggtacggaaaacttttttcaccttagcattttgtgacttctgtagaaagctgcttttccaggggttccgctgtcaaacatgtggttataaatttcaccagcgttgtagtacagaggttccactgatgtgtgttaattatgaccaactagagtaagtaatcaaaaaatttttcttttctgccacttggcatttaacttttcttaatgtgaaactagtatgtcttagagtctgtggatgttttctttacagaagagttgttacagggaattttttgaggtttggctagacagtagtgtagccagtacttctcttcagattgtaattctagtttgctgtacatttcatttatatttcatattcttttttaattaagatctcttccctgtagatatcacttttagatggtttttaagtgtttaaattaactattatatttttggaccacagattggggaatctggttctgtcagctgttctgtaaattttctctctttctcaaagttaatgtctgtctgtgtctctctctctgtcccttctctcccactccgtttcaatatattgagttaattttagtctttgtgtgtgtattgtcactactgctattaaagtctttttttttgagagttccactcagtagtttaaagtacatgataataatgtaatcttttaacaataaatatattttcttctaattccttagccatatagcatagtttttcctctctactatatagaaatttgctatatagaacaattagttatagattctgagcttgtttttgaaagtagagtataattttttaccctaagctatcagacagaaatacagctaattgaatttagcagtctttcctgaaaatgcaatttgagctcagaaatttttgctaattctctaatgtgtactggtgtatgaagcttctgggttttgcacaagttaggtttgttttgttttgtttttgtttttgcctcacagtttgctgtttgtctccaagttctttgaacaccacccaataccacaggaggaggcctccttagcagagactacccttccatgtggctcatccccttctgcacccccctccgattctattgggtatgatttgattcctgctgttcagtgacatgctacttgagctgatttttttttttttttaacttttagttgcttagaaacatttccaacatttgggtcattaaattaaggacgtttttttttccaggtaactcatcacacctgtcatacatttggtacagatacagagggttaaaactgacataggctgttgtaggaccatacttggaaaaaaccgagcaacaaataatttagagtccctgccttgtgcttgctttatttttaataatcagatagagaagtatatgatttccatttagaaaaaagcattaacacaggagataatggccaactgttataagctaatatataattataatctacaatttatgatatattattttaaactatgtgataaatattgcaatgtctacaaaagagaatagtgagagagagtagtgaacgtttaatcaagaaagtgggatttgaactggaccataaagaattccaggatctgaatgagcccaggagataaaagcatagtagtgatggtgggaccagaggggtggggggagaagagaaggacagaaacagcttatcttcattttctagtttatccattttctttagatttgataataacatttatcagatttaatccagatttttgtttttcctacgtaaagaccagtgtcctttgcatacatatttctgacttaggtgctacttgttgctgccatagtcttcatttattattaagttttgagaatgacttgctgtcactacaccagatcaattatattaattagaccaccctctacagttgtagttagtttaggctttttctacttttaagttctgacataaagtgtgttactgccttgagactttaaattagcctctaagtatttagaaagtcagtgaatgtttcaaaactttctaaaagctaatactgtcattttaaaattctttttacctgctcccaaaatctcttgccaaaggctgttattggctgtctaaagcagaagcagagacagctttgtcacatactaaaaattaatcaattaatcataataaaaaggaccacgactcagtgacttcactttcacttttcactttcatgcattggagaaggaaatggcaacccactccagtgttcttgcctggagaatcccagggatggcggagcctggtgggctgccgtctatggggtcgcacagagtcagacacaactgaagcgacttagcagcagcagcagtagagcaattattttcatttcaattctaagtggattcatttagttaatatgaacagttaaagttaaattttctttccctacccttttaaaagggtgcttcaaagaagtaaaactcataagctggtatggttcagattctagtaatatattttatttagaagctttttgtcacaactcagcttttttggctcttccgaccttcatctggtccaaaactatattttcttttcattcctctttaaaccctctctcctcttaaaaatgtctttttattccctcagctgtctttctggctgtcctattaatcacttgataatgctgattagttacagagtttacataagatggggtgcaacaataaccaatctctgaagagaagctgttagcattgaatcattcattggtcctgacggagctcactgagtcgcacctcatcgatcaagtggtactcacttttcagctcccttggatactctttctgaagaacatagacttctcatgggtgtttacagtctattctcaaacctttaatgtgctctgtgaatgccagcttcattttgggggcagtgagagatcatagactttgttatttatctacagtaccaggataggccagtgtgtcacagtttcatcaaagagcaatttttcagaaaatttgctttaaggtttaatatattattcttctttgtgtcttgtatcaattattgggcataataaacatttcaaactgtgagagattgacactctgagaatcaccttttgaatttggaaattatttttgccatttttgttcaaggttttaatttacctcttgtataaagcaatagatacatcttgtgtaaagcaatagatacctgaaatacacatgtatgctttaaaaagatttatgatttcctaatatttcccataaaaatttcaccttagtgacttcaactatcaagaaatggcaaaggtagaaataattagcagatgttattcagttagtgtgtacttagaacatttttgtataatgttaaagaacaagagtttcttcatctgattaaccacaggtaatttctagccatttcaagatttctttagagttttctgaataaaatcagtgttctatcattgatacttcgtggagggtctgcttgagcaaagcaactttgttggtgttagttgtaagcttatattagttttaaactaattcttttaaaagccattactgccattgcctttattttaaggttttatttgagaatatgaaaacaaaatctttatataattcatttttctatgttattatctctagaaagttgctctaaatcttatcttccaatcacttgacttttccaggcccccaattctcaccagtccatctccttcaaaatccattccaattccacagcctttccgaccagcagatgaagatcatcgaaatcagtttggacaacgagaccgatcctcatcagctccaaatgtgcatataaacacaatagaacctgtcaatattgatgtaagtatccagcagtgttcgaatctagaaaattcaagtgtgtttatttttctgctgtttttttggaccacagattggggaatctggttctgtcagctgttttgtaaattaagttttctctctctttcgaagttattagtgtcggtctgtgtctctctctctctctctcctctctctcccacaccctctctcaatatattgagataattttaatctttttgtgtgtatttttaatatagatttataatatagatcagaaataagtgccatgttttatttatcacagttagtataagtgatagacttttcatgaattacagatcagaaaagccttgtcatcttctctgctggcataaaatatttaactggtaccaaagtatagagttattctcattggttttttccttatgacacctctgtaaaagtcttatcttcatttatttaacagataatcagtccacttgacccatttgaaagtatagaaaaaataagaatatacttgcatatttcaatgtgaaatctttacctaaatttctaaaagttcagctttgagttaaataacccttaaggactaatcattaatttctgtacttctcgtgcaaagctactatttaccttctttactttcttgagtataccattgtactccatctctataccaatcaattattttagttacttctggctgatcactcttgaattttttccttttctagtttatattacacactggaagttaattatgaaccttagtgtcacttcttcaatttaaccttaacttttggacagcaaaaaccattcctaatatagttccctaaaataggaactattaggtgatgacctaacttaagaggtcatcaaaaaacatttgtattaataaaaggcttagaagacaaagcagaggtctatttcccataatatagaccaagggtcagcaaactcttaaagggccagatggtaaatattttaggcttgtggatcttgcagtctctaaagacaactgttgaactctgtcactagtgtgaaaacaaccatagacaataagtacattttaagcaaacagatgaggcttttattccaataaacttcagtaaagcagatggtcagcccattgtattttgccagtcccagatatagacaaaagggaaagaagagttgagaaaaaaagatgacatacacaggatcactccaaaaggactggttcattctactgtatcatcctgataaccaaattcctgaagagaataaagagcccttgacatctgagctgtggtggggtcaggatcatttctcccatagtttgtactttagaataaaaagtgtgggttatccttaatctttgaatgtaataagcaaaaaaacagaaaagctaccaaatttgtttgcattgggaagtaatcatatttaaaaagaaatctgaaactctttactcagataagcagggtactgaaattactgaggggtcatgtgtatgctagaggacagcctgttgttctctaatgagcctaatgttctcattatataggcattccttctgtgagttctcataaggttgagtaaaggagccaaaattatcctaacaggaaaatattcactaattaacagactcccctaataagtctgcacccacatattcctcctacccatttaatactagcttgcattccagccctttttcatcactatccaacattgctatgaaaaagtaaagcagactgattgctagtctgacaacaaaaaaaagattttaaggatttattgaagacagtgaaaagccattgggaaataaggatgcagcagaattaaattagtccagttaacagtaaaagagagtaagtgtctaaaggatgacaagagaacaggcttttctaaagaaaatgaattaaatatcaaaggattgatggaggcattgagggaactgatgaaatcctttaaaatttttatagaaatgagtgattatgatgtgaaagataaatattaaattgagagtttcagtttatattattgtaagcttgatattacaaccaacaaaaccttgattccctctgtattaattctaagaattaacatattattgacattataacttaatatttttgttgaagtaaatgaaaataaacttatcaatcttaacttcatttttcaagatacattcccaagtcagaccttcttcctactttttgctatgaaattttttttttctgattttgttggatttatttaaagtagccttttcttaataccaatttttctcagctgaaaaggtcttcttccatctggctagacccatatacaaagggggaaaagagtaggagagggaaataaatgaataaggagattttgtgaaatatgaaatcaaatcttctttctaggttagatctattgtcagcatggtcaaggttgtaaactttgtatttactttcaaaactaacattcttttagactattcctctttatatcttagtgttactaagattcccttgttctcttgggcttgaacatttgcagcgtcatgtttatatcttgctttttcatcttccccataagcaaatagtcataagatgtcacctttccttttgatatatatctcaaatttgttttttctaccaccatttgggcccatatttcttcacttgaactacttatgacgttaatctgctatataaatttcctgccattgatttctctgtccatttacattctttattgctactgtcaaaataggattttattctttattgtaagacttcaatcaccatctgttcctttgttataaaacttttgtttacttcccattgattataaaatataaaccttttagcatttcattcagtttcagtcatttcattcagtttcagtcattatttatcatttattactccagtaaaccaaatttaatatttactgtgggataggcactgtatcaaaatagggaattaagatgaattagcatacagtctttgccctcagggaggtcacggtctaatggatgaatcagacatagaaataaacaaacacaaaaatatacaatgatagtttatagaaggggatgaactctacctgactaaagacagtcaagtttagcagagaagagacaacatttaagccagattgtagaagatgaacaatgaatatgaaggagtaggaatttgttaagtacctagtgctaggggttttaagaaggaagaacatttgttaaggaaatggtatgtgcagagtatggaagtacctttatgagggatgtaattaatacttgatattgtagggaagatgacatgtattattctgagttctctgtagttgatagtgaagggtccagtaaactgagtgggaaagaaagtggtcagctctttgctttagaaaaatcttttgaattagtgagacatttgatagatgggattgttaggattgatactgtaaatggcatgcttactagtgctaggtcctttaccaagtacataaattttcttattccttcctcataaacacttgtgagttaagtactattattttccttcttttactgttaagaaaattagatttagagatgtcaagaaacttattccagatcacacggatataaatgataacacaggtgataaattattgaaatggggtaaaacctggccattcttcttatagtcaatcattgttttatctagtagtagaggagagaagtgggagatgagagataaaaaaagacaatgcctagaattctctgccttagatgaatacatagtatttatttgattcattaagatagaaatgcatagggaagaacatggtttgtaggaatgaaaaatgttaacttttattttagacatactgacttgaagatgtctgtggatctttactggtttagaagtccagtagcagttgaaataaagactttgagtagaggtacacatttagaaataattagcctatttgtgttaaagtcatggatgtaaatgatattactccaaggttatgtaaattgagaagtaggtagaaatgcaaccctagtgatcattaacatttgagatataggcagcaactgtctttctctgtcttcattataggctcctcttcctaaatttagcttcaaacaaataagagaaagtagtgttgaagaagccaaagggagaaatggggacttcaggaatgctgaagtagttgatggcagttgtcattgagactcaaatgagatgtaactattgaatatattcaatataactattgaactgagcaattacagtgtcattttgatgtcattgagagctgttttagaggtctagtggaggagagcaaaagctggtaaagatttgggattcagtgccagatttgagaagcttggctacaaaggaatgacgaaagccatagactgaagcagagtcatgtgagagccttgagcatcttgtaacttgagaggaagaagcaagtagagagagaggttcaaaggaacaagaggaggaataattaaggtagtaaataaaaattccttgagcttggaagtgatgttcctcaggggctatgaggagttaaaggtgaacatagctgcctccgaactctttagaggcagaatgaccatgggcagatgacttaaccttggggctaacagtgtctaccccttgtagtgatgatcattcttggcacaaaaaaagaattcagaaattatagctaatttattattatgcaggtgtttgtagatataaagacagaacagaatgttctttgatagcttctgttttctctatcctgctaaaaaggggaagagcagtaattaggaaaggaactataggaaattgggggaaggtttgaaatagccagtattggaatactagaagatcttgtttaacctagatcacatagaaaaagattgtcagagagctttaagaacatatttaagattggaaaatacaagcttgtggtggttattagcagtaggttgtccagaaggcctttctttcttttttttcttttttttttttctgtctgcgctgctcagcttatgggaccgtactttcctgatgagggcttaaaccccagctctcagcagtgaaaggtcagagtcctggaccaccagggaattcctcctctgcttttctgcatcctatctacagctcagactccagctcttagattaacttcttcaaatgcttcaccagtgaccaagttctatagttatttctttatcctttgaacttatgttgcaccaagaatctttttacatataccgtttatttggcaattaattaagcaactttggtacctttttttattgttttcttaagctcttctttttatgtaaatttatgtgtttgtatatctttcttagatgataagctgtcaagaactcaaagctagtgagaccatgattttatatttattggtagtcaaacaaccactaacacttagcatcttatttgcagatatttgttaattattctgtataaaatgttaaaggttttttatagtacattgaacatggcagaaatgcatctgtaaagaatcttctcttgttttagcttataagcctttgggcatacttagagacatttggggtcgttcagtcatcagttatactgggtaaactaagttctgacaaagtccaaattgtgtccaaattgcactgcattgccagtggactcctccgccactgccctgcctcacattgttgtaaaaggctgtattttaataataaagacaactaaaaaaatgtttcccttctagtgtgtccttaaacatttatatttttatgatcgtatcagtgtacacttaattttgtatccttttttaattataaatgtttcatgattcagacttcataactgttttagtagctgcataatatgttctaaattgacacactataatttacttaaccagtatgtcaatatgcctaaaatgttagtatgcctaaaatagggaaataattatttctggtgtttttttagtataatgggtaatgttgcactaaacatctttgtgcatatcattttttcttatgaattatttctttaggaaaaatttccagaagtggaattataggatcaaagggtatgaacattttatggctcttaatatgtgccagtagaatgtttttgagcattaatgcacccattggttttgaatggcctgaaatggatttcagcatttgatcaggactagtaatcccttcagtctagggttaggttggcaggtgtttcaaagttgttattttatcatgttcactagttaattccatattctttctgttttatgaagtaatttataagacaggtattattttgaattcacctttctgttaatgcttagtggaaaataaaatgttgttgcttttttatcatatgctttggtttgattaagtgtacattactatctatttgtaggacttgattagagaccaagggtttcgtagtgatggaggtaagtagtgatttcaatttaaaaaaaaaaacaaaaactggggaagaatgcaattgctttgctgcttgtctcctttatatgtgcttctttcatgaaacacagacacagagaaaaatatgtagagaaaaataaaaaattgtttgcttttctttagtaattatcacttattgctaataaaattttaactgattttaaattttaactccagaaacagaaaaagagaggacataaaaggggagtcttaaatgtgacatctacaaatttttaaatgtttttatcaaattattttacccattttattcctaagtatctccactaatacttaaagactgagcttacaatcagttaaaacttgacttccttaaatcattctttggaaaaatccctgggattacctgctacagctcgtcagtttgatagacactgtcagctacttcccttcagcttttagaaggccctggaagataaattttagagcgtggacccctaatagaaaagcccagttcctctcttactagtccagtaaataaaataagcaaatgagagatcaaattgagatttcttaaagaattttatcagctgtttactctagcacccagtgaatattggggtcatagaaaaacattactttagaaaatactttttaaaataagagtttacccccataagatttttgtaagagatgttgtttgaaacagtcttgacgttttctgccaggtggtcctttatgcttccctcttcaactgtctctgtttaataaggaagccctgcaatgcccacatactttgtttagagtcagtctcttcactgtgaccctgctttatattcaaaatatctaagcccagatgcaaagatactttatgtcagatgttgcatgaaccatctttgttatgtttctatatacttgtgggcctaccagaataataaacctgtgttatgtactctggagttagtatttactatacgtagtacatagtttaaaaagtggttttttttcctgttattccatgaacccaccaattaatgttgctgccagtttgactttcgtatgtcttaatagctgtggcttttgacagttttgcccagtacatctggcatttaaatgttgccatcacgttaccatcacagagctaactagtcataaaaattgcctgcttagtaccaaaagtcaaacagcatttatcctttatatgaatcacttttaaaagaatgattggaattttatgaaaataagcagttttttaaacatccagaattattttatgaagcaggcttcaactcatttattccccgtgacttctttcatttcttctgtgtctgtcttcctgtgtttgcctgcccctctctttctcttctaacagcccctttgaaccagctgatgcgctgtcttcggaaataccaatcccggactcccagtcccctcctccattctgtccccagtgaaatagtgtttgattttgagcctggcccagtgttcagaggtagttgggctcttctttcttgttttcacccaaagcaaattaaatataaacaccagatactgtttgtgtctcgccctcacagtgtgcttgtaagtgtgagagttttcagtactcagtctctgcttggcctggctggagtgctctggatgtgcttctcacacatactcacttccacaagctttctgtatgctgtctgtcataaatgtttaaaagtgagggctgaaatttccatcttgttttttgttaatactactttttggtcttgataatatcttaaactcagggggtggcagtaaataatgtggggagggttttcttcaagctgaatttcttttacttttatccatttaagcgataaccttgatggttgctaatatcaatttttttggtttttaaaaaatggaaatccctattatgagttcttattagacttttggctttgcctttttgtaatatttgttctttttttttttaaagcataagccatgtatattttatatcaaaactaggtaacttaaagaagatctataatatatttgaggtattttagcatactttagaaaattaagattgatactttgagttatgctctcatatgaggggaaagtttagcagtataatttcagccatccattttatctcaccattctttgattagtggttaaactaattcttaaaaatttaagtcaaaatttagacaagtgtcttgctgtaaatatttctaaagaattatatttagcggtttttgctagtgtctgttacttattctgaatgaatgatggttttcagatttttgctctttctgcccaactttctcagaaaatccatggaatgggctggaagttatagagaaccgagtagtgtaattaaagtaagtgatgcggtacagcactgagtaggtcaggattgtgaagcctgagtaaacagttagggctttatgatgttgaaatattatcagtggaaggcagaatatggattgtagttaatagatattccagttaataactgtagttaatagatattccaggtgtcattttcttttagaaaattgcatgtgagatcatggaaattagtaatgatgaaatttctacacagttttaacattttaaatgttgccattagtattttgatccttgtcctttgagagagagtaactttttaacttggaatagttacctaatttttttttttaatggaagtctttgtgttctgtttgtgtaattattaactgacatctcagtcctgcttagctatactcaggccccaccaggagtcattaccctgaacccctctgaaccaggtgctttctgtacatgaattgggatttttgttcagtcagcacttggaagaaaaagtatccatcagaaaggtatgcaaccctgccagctgagtccattttcagagtgtagcccttggactcattttgctgataaaatatttccatttgtagtaacttggctgagatgccattgcacttaccttgttctcattttatataggcagagatttttcagaaagtcttgagaaacctacttggctttgttggcattaactttgttgtgcaggtaaaataatctttgtttagcaaaataaggctccagaaaccaatgacagtgaccagtatctctcttaaatagtatatagtatgtagtataggattttttaaaattttaatggctaatatgaaagagttagataatgtcaatattaaggacattattagaaaatgtttccatttggagcatttctatctttttttattattattgattagctgttaatgtcacataattaaagtttattttttatgtttgcttttaaattgactttgctttttagtttttttgatcaaagaaaaaattgggatatatttaagattgtttttctcctagactgtacagcagtaagcaaagtatatatctataatcatatattttaaaggttattaaattgaccaaaatgctaaaactgtaaaactaaaagaaactatagtttttaaatttatagttaatcaccaaatgaggcccgctttttgcctgtcctttcctaatggtcaatattaagacatgcactgcattttttaaaataagtctacatctccctgcatcctctgcccccagtaagctaacgtacttgatcctcctttaatagataaatttttcctttcactaacttaggatcaaccacaggtttatctgccacaccccctgcctcattacctggctcactctctaatgtgaaagcattgcagaaatctccaggacctcagcgagaaagaaagtcctcttcatcctcagaagacaggaatcgaatggtgagagttttcctctgaagtgctttcttcttagaaatcattaagagctgatagtttttaacttaaagcatattcctacaatgttgatttttgctctaaactctaatataattcagtaaaaggcagttttggaagagttagaatagtgttctgtttctgaactatggaaagagagtaagctggaattttaggaagcattaggcatatatgttttaaagagttggtctgaaattcaaatatctaccaaaggacattttttcctattgaaaaattaaatttatgctgtaacttaactatttattaaaaactgaccacattagcagcagtgcactagtatgtataccagagttttgtatgtgttgataacatttttgagagagagattggatcggataagatgtatgaagtaatttaatttagtactgactgggagaaaataattagattatcaacagttgcctagtaccttaactcaaatttttggcctttggagccaaagctagtcacaaatgtgtagtgcttatcttgcccctagtagtcttccaaatgatttttttaaagttgctttattttattgattttaatactgtaatttaatataacatttctgctcataaccaataaataatttttatttttactgaattatttccatcctaatattgacttagttcttcaacttaagttgtgtattgtaagaatcatcttcctattattcctcgagtatagttttgttttgtttctccccaaagttcttattctcttatgtccctttcagaaatagaggaatgtacttagtgtcaaacataacgttttccttttttgtttgctttggcttgacttttgccttatttttatcaagaaaacgcttggtagacgggattcaagtgacgattgggagattcctgacggacagatcacagtgggacagagaattggatcagggtcatttgggacagtctacaagggaaagtggcatggtacgtatgtcatacagtgatcttgtcacaacttttgttaaaaagaaaatatcaaagggaatattcactgtttgtatcattaaactgttttgatcagatgtaagagttccccaaaggtttttaacaaaaattatgggaaataaaaattggattcacagcaaccagaagtcctctcattatacttcagtaataaagatggtgatcctccagatgagctagtcaccaagattcttttttataagtctttctgctggtaattttatttgtattataaaccacaagtaaacatataaaaagagaacttaaccaaaggaagaaatgaccagtaaacatataaaaaatgttcagtctcactacttgtgaaagaattaaaaattcaaaaaataggaatcatcattgcctcttaagtgacttatctttctttgaaaaaataatcaaatggacaataattattttaattgattgtttagagttgtgattgtaaggctgctggtgggaaagtaaattgctatgaattttctggagggcagtttggcaatatgtatatggagccaataattttatttgtagaacaggaacaaacagatgtgtaagtatattcattggagatttaatattaatgaaaaatccccattaaaagaagattggattatactgataacatccatatataattatatagacagtaaaatggtatggtagatctatatttattgatatggaaaagtttctgtggtatattttaaaacctgcatgtatagtatcccatactatgatgctacatatatatatatatcataattttctaaatgaccatcaatattttagtatatatcttttttaggttgtctttttcgtgtgtgtgtgtgtgtgttaatcactcagttgtgtctgactcttggcagtcccatagactgtagtccaccaggctcctctgtccatgggattctccaggcaagaatactggagtgggttgccatttccttttccagaggatcttcccaactcaggggtgaaacctacatatttataaatgttcatactgcgtacttttaagagcctagtaaggaatacaacaggtcttcccatgtggcactagtgataaagaatccaccctgccaatgcaaaagatacaagagccgtgggttcggtctctgggtcaggaggatcccctggaggaggacatggcaacctactctgatattctttcttggagaatctcaaggacagaagagcctggcggactatagtccgtagggtcacaaagagtcagacacggctaaagtgactgagtatacacacagggtatacaagagtaggttaacagtgatcatttttgaatgacatgattatgggagatttttattttattccttaggcttttaaaatgtttaattttttaagttagtttttttgctataaacatttgataatcaggaaaaatcaatgtttaattatattgaaatatacatgcaaataagtgcactttaatgtacaggtagctaaaattttgcaaagtttacacatctggtcaataaacagagcattcccagaactctataagtccttttcatgtccctcacccccaagagtagccactatccatacctgaacagacatagtaatacagtatgtactcctttgtgtctggccctttttacacaatattgttttaagattcatctatattattgtatgtagttgtaggttattcattctctatatagtgttcattgtgtgactataggcatgactttttactgtgtgaccagcatttgaatagtttccagtttggggcttttataaacgctgctgctatgaatattcttagcacctgtcatttagtgaacatatgtgtccatggtggttggtatatacctaagaaagacttgtggggccagtagtccattctaaaggagatcagttctgggtgttcattggagggactgatgctaaagctgaaactccaatactttggccacctcatgcaaagagttaactcactggaaaagaccctgatgctgggagggattaggggcaggaggagaaggggacgacagaggatgagatggctggatggcatcaccgactcgatagacatgagtttgagtgaactccaggagttggtgatggacagggaggcctggggtgctgcaattcttggggtcgcaaagagttggacacgactgagcgactgaaccgaactgaagtagatattaacacaacagtgtttcaggtggttgtaccaatttatacaccttttggcaatgtgtaagaattttacctgtttcatataaaggtgttttgttttaataatttttctaagtaaaagcaataagtgatccatggatttgaaggaagtgttaaatactctgataaagaagtttgcagttttctctttccgcaaagttccattcagcctgtcatctgcagttttaacattcagttggtgaatgcatctaatttagttttgctaaatagctaggaaaatatcatggatatttaattggttagactaaatttccaaggggaaaatgagataggctggttgtttttgagggaggggggacagggattggtattttaaaatactagtgtcatttttagtttctatccttagagaattaatgccatttaggtagttaaggtataatttatttgcagttttgtaatggtgtggttttaatgctgtggtaacttgtgaaaataccctagagttttttgtatttttaaattttaaagattggaatgacatttggagtggcaattaccttttaggtgatgtggcagtgaaaatgttgaatgtgacagcacccacacctcagcagttacaggccttcaaaaatgaagtaggagtactcaggtaagcttgtgtgaatcatgttttccagagaagttaccttgatcaacagctgctgttagcttcacagatttactcaaaatggacaaaacaaagtctttctgagtttattttgtctttgttttcttttaagtcatatgcaatattatatgtacagctgataaaaatattaatcctaaagtgaattaatggaattacagtattccgatcatgaaaagtggtacttcttcttatgggaatactgctctcaaaattctaaggttatcagaacacccttagagattgtatcaaaccgggaacttgaggaaaatgagcaaactagagtatgtccaggcaaggagaacttagatgcggaggattctggaactataactggggagaaaattgtcaacagaactgagactataggtccataggaggctattatgttcaaaagggtataaacttgctctgttttattctagagagtagaacagagaagccagtgatgaaagttgcaggaaaatgtttttctaagccgaaaatttgactaatactagaactacttcaaagggaagaaagaaaagaagagaggacttcccaggtgtctagtgggtatgattccacacttccactgcaggggcgcaggttccatccctggtgaaggaacttcagattccccggttgtgaaacatgaattccacatgccgcatgatgcggccaaaaaacagaaaaaaaaaagagttagtgggaacaggctacagtcttagtgatgaacgtcccataattaaaggtatttaaataatatctagttgcctgtctatgaggtacactaaaaaagacgtttatgaaaaagttaggatgttagactagataattcctaaagtctcatctaaatttatccttctgctgacttgctaaaaaaatacctttttctgacagcatcttattgacaaatagactgctttggccctggttttgtgttttgtttgtttttttaacatttgctaaagtgtatccacatttactatttcctgttatatttctttttacaggaaaacgcgacatgtgaatatcctcctcttcatgggttattcaacaaagccacaactggctattgttacccagtggtgtgagggctccagtttatatcatcatctccacatcattgagaccaaattcgagatgatcaaacttatagatattgcacggcagactgcacagggcatggagtaagttccattctgttaaatctcatgtaaattacttttgaagaccactgaggatgtttgaaaggttttagctattattcttttgacttaaattcccagttactctccaacatcatatggacacttctaactaatggctagctttatgatattaagaaatagaatagtctgtctctagtacagtctttaaaacatatatcaaatatttgataatatttatgtggctgtgaatttgtgtttactatactataatttcgctaagcagtgagggatcaaaagataaaaatagtcccccctgcccctgcaaaaataaatccactgaaaagtcattaacagttattgaagtatataaaatgattgttaattatcctttcaagttattttctccatgtgcccctattttctattgcaaaataatcatctgtgaaaaatatagtaaaaataaagtgaaagtctgcagtttgattctttttgaagatttcaggttgattagttcattggattttattttgtaatttaaaagattaaaaaattgctttataaaatttatcataggccaaagtaagaaattgactaccaaggatagattttgcataaagtgcaaataaacagtaaataaatcaaaaggtaaaattaaatatattttaaaagcacttagatgaaaaaatttaagtgagttaaatacaattttgaaggttccatatgtagtttaaaaatatgcatgtatattaagtcagtttgacattttatagtatacagataactttcacatacatagtcatgacatttaatttttataatgttataaagtagatattttatgtttacagacaaagaaactgaggcttctaaatgacttgtctagacttcacatttaataagcagcagcaaagatgtttaactgaaaatttttggctcccaaccattattctttccccataaccactataccatttttgcattataaaattagaataaaacagtaaaagagtgtacatgtattaatacctaaaactctgactcagggtcatttatagcaaataaggatagaaccaggactccaaacctgatctagctcttaaatcttcccactgtcctaccctctctgtcagaaaactaggcagtatatttgtaatttagattgtttataagtctgtattcagctaaagtccttattgcagcaacttatttctttattcagtaacattcccacttttccagtagactaaaacagccccacctctgactgtgaatctattcaaatctgaaaagttatattaaagtcttgcaaagagtcaactgtggccacaatggtaaacattgaaagagaaacaaatcttgttctgcttctaccccaccagtctcgttgctgcttctttagcaggccaagtatgctctttgctcagggcgtttgtacttgttattttctttttaggataagtactcctgccaccaagtattcatagagcttctcccttatgtctctgttccaatgttgccttttcaaggaagccttcaaatgatcaccttatataactaaaacattcctacaccactctatcaccctatgccccacgcctgtttttgttaacacccaactccatataacgtttgtttattgtctgtcatccccactagaatacaagctatacgagagcaggggtttaatgtcgtgctccttgttttatctctaatgcctgaaacaaggcctgacctgtgatagatacatatgacaaaaattttaaaatgaaaccatgattacacacaacagcatattattgataggtttaccgtccagaagagagagcagccacatccttgtcgtatcaaaagtgggaaatgtcaagaaaaggaaaaacagtcaaagacgtaatcaaagattaacacagaggaaaaggcttttgctatacacagaggcagcagagaatagtattaaatattgttttagaaacagtggctgggcagtaaagtgcatgttgattaaggtaagaagtggcggcagagaaaaaccctgtcaaattggaattgttctgtggtctgggaaatagttaagaggcggtattttcccattactttacagtttgggatctgtaagtataaacctttacagtctgtgtgtttactctaaaatactttgtttacattttgaagtaactcttaactatatgatgcgtatatctggctgtgaatgtaaatcatcccattagtttatcctttatcttaatagctgaaaaatattaattataaaatataagccttctaacattatattttttattgccagcttaaatttaaccaaagaaggtacagttcctttttttcattttggttcttataagacaatatatgcaactggttaaatgttctaacatatctttagttactgaaggctttggcagattgaaagtcctcttattaaagtggctatgtggctttcaggttaaggtgacccatttttgtttccttgagatgccactaaaactataataatgaaaattgtctttaagcatgaacatataatgatggagaggaaaaaaagaatagcagtaatattttagaagctagaaaagcagatgaagaagtgataatagatgtagtgcacccaaaaaaactaaattattaactgggtgtggaaaaatggaagccaacctaatttgtaccacagaatcctcaagtctcaagaactgggagtgtgaattatctctggaggaggaaaagtacataaatgaaaaggcctatctgaaatgtttctctggatcccttctcatgctctgtgccactgggtggacaccccattcctaccctggcaggacactggaaacatgttctctagagaagagagaaagtttctggactcaagacacagggaaaatggggtgcagagttgggtgactgcctactaagtgatggctggagagttccctagtattctcttttcatttgtttcccagaaggctggcagccaaaccttccccttcaggcaggagattggaagactcttggctggtggtagattcctccagccaagagtcgagacacaaagttagtgatattaggaattccatctagatgggagtacatgggagttcagaaccagaattccatttgtattctccaagcttttagactgtcttttagtctcagtctgggtaaagacaaattatctctcaactaccagacatcagagggacagtctcttgggccagtgacagagaacaaatgggggaaaggagactaggaataaacacacacagttcaaggaaaagggctaacctcttcccctaagcccccgcaaaaatactcctatcagtttcctcagagataaaagattttctgtgaaataaggacagatgctttataaggaacattcatataacaatgcaaaaaatgttaaaatgctgatatttatagtcaactggaaattacgttccatccaattatttaaactttcagatgtcaggtcccttttccattgtccttcaccatcatttcatcaagtacagaacaagttagatgtagctgaccagtagatctgtagactatttaaatagttgcttagtaatggcctttacacagcactcatttcaaactagtctgcccctgaatgatttccggagactgttcaaaatgatgttttctgactactttccaaaactgattctaaagtaccaggatgtaaacagaataagagcatactgtttcactattaaagtactggcgttgcagtcattctaggtaaaacctttaggaattaggaagattgaattattgggattttcaattgtgtctcctttattggattacaatatataagccaacagtagatgagtgacatttttcctgtgtgactgtcttctctcttcagcaaaagatcatttctgattcctaggtttactttaagagagcagagctgttctagtggcagataattaaattcattcttaggaatcaggattcatatagtatatgtttatcatcttcccacctgacagtcattgattctgccaaagggccaaggtatttaaagaataacattacaaagaaattccaggaattgtcggtctgttgtgctatttcttttcagggcttttcatttcagtctaatatttattgtataattttaaatgtagcattattagaaaatttactaagtgtttactcagggaggcacacagaaaaagttgcaatctattgttcacacaggagtgatacattctgattgtaaggtgattaaaaataatttgaggatgctaatgctaagtcccttcagtcgtgtccgactctttgtgaccccatagacggcagcccaccaggctcccccgtccccgggattctccaggcaagaacgctggagtgggttgccatttccttctccaatgcgtgaaagtgaaaagtgaaagtgaagtcactcagtcgtatccgactcttagcgaccccatggactgcagcccaccaggctcctccatccatgggattttccaggcaagagtactggaggggggtgccattgccttctccaatttgaggataaactcttacaatttacttaaaaaacaataatgaagggtatgcttctttttactcataggtaagcctagttaaaagaaagatagaaggatgaattgaagctgagaagatggtgaacatgtattaattactgaaaataattctggttgatcaaagaatatttaattataaataaacattattttctggcagataaaaacagtaattgagaggaggatgctgataatcacaaaaaatgcagattaaaaaaagtactattttttacctactagaattgctacaatgcccaaattgtggcaagattaagtattgataaagattagggggattgcttactgggacactcctgatgcagccaaccaccctggggataacttggaaggatctattaaagtgtttggtctgcccccaagaaacaaccagcttttgttccaagagaggtatattgaaggagatgtactacaggaaaatatctactagtgaaaatttggaaacataaatgttcatcaatagaggactgcataactaaagtattggcacatatgtgcaggaaaagaatatataatacaaatggataatatatgtttcaacatcacctttaaagtatgtaaagtgagaaaagcgagctgcagcatgagaccacttaaaattttaaaaacaaaacattacatatatttttaaatcttacatatatgtatgtagaaatattaaacaaaagcttagaaggtgcacggcaagctcaatcagtagtagttgtctccaggatggcaaaaagagtcttaagatggggatagcttatcaaggacagagagactttagttttacctacgaaaaattcttgtggtttctgtctttttatttaaaagattctacagttgtgttttattttcacaactttcttacaagtgtaatttttttaaaaacaggaggcaaatgtgtaaaaatttaaaagcgttaagtatagtgaggaaaagtggtttctacagttagcctttgttgcagtttttcttaatttcaaaatgtaaagtattataaggaaatacataatcactatagaaaatttagaaaacgtaagcataaataagcaccagtacggcttccctggtggctcaggttaaagcgtctgcctggaatccaggagacccaggttcgatccctgggtcgggaagatcccctggaaaaggaaatggcaacgcactccagtactcttgcctggagaatcccatgcaggaaggagcctggtaggctacagttcatgggatcacaaagagtcggacaccactgagtgacttcacttactctaatgagagagaattactgttaatgttcggatgtatagtgttgtgtatcttttcaaaattctgtattttcatactatatacagtcgtttgttgttttaaatacagaatcacacttttacttttttttacttgctcttattttagacgtctttaccgatcaataaatattatgttctaactccatctctgctactactaataactcactctttttttttataccaagtatgttttgtgggattttttatatacagtgatacatatagcagttacatatttgttccaagcgctgttcctgtgtactttatatatactatctcatttaatccttagcaaccctgttgttcagtcgcaaagtcgtgcctaactctttgcaaccccatagactgcagcatgccaggcttccctgcccttcactatctccctgagtttgctcaaactcatgtctgttgagtcagtgatgccatccaaccatctcatcctttgctacccccttctccttctgccctcagtctttcccagcatcagggtcttttccaccctgcaggtagatactgttattatcctgtatttatttactggtggagaaactacagtttaaagggccaggtgacttgccgcaagcactttggctccagagtgtatttccttgacctcttcactgttctgcttcttcagtttagttctttcaccatataaatgggccctgaatgctatgcagccatcatacttccactccctgcgtttttactcttcctctctcgtagaccctgtcatatttcttctatcttcagtcctccaatatctcttctctaagaactgtcagctgataaactcgcttgccattttatattacgtattggaaacacccaccacaatatcttcctacctacttaacattcatacttaattttcctgtctcgtcgttaagactgaaagccagtctttccattttgtacatgcataccatcccctttctcctacagactgacatcttttgaggagcactctcctgttcaacatcagattttccttttctactggattttcttgtgttttaaaacatttcttatggaagaatattgataattgttaaacctaggtgcaagtcacaggatattatgctgttttcatttttctgtgcatgaaagtttttgtaataagttgtgggagtccttttcttgaccccacttccctctcaagctatcacttcattcctcttctttcttctatagtaaaacttctcaactgagtgtccttactcactctataaattcttccctccccgtttttcttggatcccactccagtcaggcttttgcccctgaaacgtcactgaaatatctcttaataagatagttaccatgttgctagatccagtggttaaatactcagtcctcaaccatcagaagtatataatgcagttgatcacactgttcttcatgaaatctcttcttaatcccttaaactctaccacctgggagccttttagaaaagctgaattttaaacaccacctcatatctgctgaattgaagtctgcattttaacaagatccctaagtaattctaatcattaatcattctaaagtttgagaagcattactttttattctcctgatttcccttcttactatctgttccttctcagctagttcttcaactccttaacctctctaaatattgaagtagtcctttggtaatgtcatcaagtttcatgacttaaaataccatttaattttcatttctatggcagtctccagctaattcatatactgtgaactccagactgtcatatctaactgtgcttaacatctcttgattgtccagtgacatctcagatgtaatatatctgattctgaggtcctgatctttttcctcaagcctgcccttctgcagtcttttcatcgcagtgactggcagctctcttcttaggctgcttgtatctgacatcttgttcctggtctttgatgtctgtctttttcttacaccatactaccaatctattaatcagctccagttatctttatctttaaagtatatctaggatcttactctaatggcacaaagagaagaattaaagagtctcttgatgagggtgaaagaaaagagtgaaaaagcttaaaactcaacataaaaagagaacagtaactaagatcatggcatctggtcccatcactccatggcaagtagatggggaaacaatggaaacagtgacagactttatttccttgggctccaaaatcactgtggactgtgactgcagccgtgaaatttaaaagatgttccttggaaggaaagctatgacagacctagacagtatattaaaaagcaaagacatcactttgctgacagacatctgtataatcaaagctgtggtttttccagtagtcatgtatggatgtgagaactggaccataaagaaggctgagcactgaagaattgatgcctttgagttgtggtgctggagaagactctgaaagtcctttgaactgcaaggaaaccaaatcagtcaatcctaaaggaaatcaaccctaaatattcattgaaaggactgatgctgaagctccaatacttgttcacctgatgcaaagagctgactcattggtaaagaccttgatgctgggaaatactgaaggcaggaggagaggggttgacaggatgaggtggttagatagcatcaccgactcaatggacatgaatctgagcaaactccaggagatggtaaagggcaaagaagcctggcgtgctgcagtccatccatgaggttataaagagtcagacacaacttagcgactgaatcgcagcaagaatctcacagcctctcatcacctattctgctgttaccctgattcaggccacagttactcttgcctgggtgagtgccttacttccacccttacccacctttattatattctcaacttagtagccagagtagtcctttgaagacttcagtgagatcatgttgctcttctgctcctccagtgtcttcacatttcatacagaaaggaagccagagtacttacaatagttcttagaatgtcaccaccacctccctccctcccccactgcctatttttactacctctctcaactcatttactactcttctgcctcttgctttcccatccaagccaggttgccgttgctattcatagaacgcaggaagcacacagctgccgtggggttttgcccttgctcgtccctctgcctgctgtgttcttatcccatatctgtatgactctctccctctcctcctttgaatctttactcaagctgtcctttgaaagggacttcccttatggctcagacggtaaaagaggaagacaatgtgagagacctgggttcgatccctggatcgagaagatctcctggagaaggaaatggcaacccactccagtactcttgcctggaaaattccatggatggaggagcctggtaagctacagtccatggggtcgcgaagagtcggacacgactgagcgacttcactgtcaatgtcaatgtcctttgaaaagagaccttccctggcctgaaattacaaccccctgaaactcagcgttttctgtctcccacctattttttggcatcttttttatatcttttgtactacagtgcaagcccctttagggtagggattttctgcttaatttccaagacgtagaacagttgttgcatagcacagagtgtgctttaaataaatatgtgttaaataaatgaaagaaagaacctaaaaaggtaaacattatctccgttttacacgttagaaatccagagcttcaggaattatgtcatgtacccaaggttatatggctagtaagtggatatacagttggatctcagagccagatctgcacattcacaacgcatgtcctttcctctgcgcctttctggtcacggcacttagatcctctgggctctggtttaccatcagcgtaagtggccttattgaccttttgcttgcctcacaaagaaacacaaaggttataaaatcaaatgatgtaaaaatatcctgagaacttgaaaatgctttatgtgtacaagagggtgatagtaatcctttggttttttaatagaagttttacaatttttgcttttagttttagttcttccacctacttcaaattaggatgaagtaaggattgaagattttttttttccttatgtggatatccaattgttccagcaacagtggttgaagtacctatcatttcccacatttaactgtcttgctcttataaataaacaaataccatacttgtgaatgtatgtatttgagcttatgaatgctactctaagagtagcatatttttgctcttccatcaatgtcatggtagtccgtgtttacagtacactctcacgtggtctctccaggccagtggtgcacttaaattataatgcaagcattttccaaggagatattataccctctctaatgtaagtcccagccaggaaatggagcatgcagataccatgttcatggactagaaaactcagtattattaagatgtctatttttttccaaattgatctatagaatctataggtttagtacagccccagtctcagcaggattttggtataaattcacaagctgatcctaaaacatatatggaaatacagtagcacaaatagtcagttttagtcagtcagacagttttgaaaaagaacaaagttaaaggacatttgatgtgagattcaaaactttctataagctgccacagtaatcaagacagtgtaattattaatgatagatgtgtgactcaacaaaacaggaaagaaagtctagaaatatatctattatgtctgtgatcagtagttttttttttttttaaacgccaagatgccagggcaattcatggagaaaggatagtcctttcaaacagtgttactggagattgattctcagccccctcggaggaggtttgtcttacaacttcaccatcaacagtcatcttctcttctagaattcctctctgagaattctggcaggattcagaatccccctaccttttggaacccacctccttatcctctcccagagtccttttcctcttaaagcccccttccctagaatctagctttcaccaaaacttccttcctttcagtctcctccttcccaaattctcagaggcccactccccaatccccctcatcagagctctcacaccccctctttgcctgaatctccctccactcggggccccctctttcccctacccccgcctactctccccagaatcttcctctcctcagagtccacaacccctgcatccccctccttcagaagctccctctccccaacccacttttcccataactggccccctagagcccattttcacaaaatcttcatcctgggacttctctggtgactaagcctcctcactccccatgcaagggggcctgtgttccatccctggtcagggaattagatcctgcatgccactaccaaagaagacgcgtgccacagctcatgcacaaggaagagcaaagatcccatgtaactaagacctggcacggccaaacaaataaacactttaaaacaaaatgttaccggaacaactgtatatccaaataggataaacaactagcccttttctggcataagacatgaatattcattcaaaatggatcaaaggcctaagactaaaagctgaacatctaaaacctctagaagaaacaaaggagaaaatcattgtagcctaaagtttggtaaagatttctcatgacacaaaaattaagaaccataaaagaaaaaattaacaaattagacttcatcagaatttaaaacatttgcttttcaaaagacactgttaagaaaatgaaaagacaagccacagacttgaagataatgtttgcaggacacattatccgttaaaacaattatatccaaagcatatgaagaactcttacaatttggttataatacaaactacccaatgaacaaatgggcaaaagattagagtactttattaaagaagatgaaagaatggcaaataagcacacgcaaagatcctcaacatgttagacattaaagatagggtactactacacacctgctagaatgcttataatcagagccaacaataccagtatttgcaaggatgcagagtgaccatgttgctggcaaggatcttaaatggtgcaaccactttggcaggttcttttcaaattaaaattaaccatatgagcaattctaatctcactgacttcccagaagaaatgaaaacaagtcagcaacaaagactcatatatgaatgtttacatgaatgtttatagatagtatcttattcgtaattgtcaaaaaaaacaacaacccaaatgtctaacaactaactggttaagttatggtatgtctatccactgtaatcctgtatgcagccagggtgtgagtctccaaatcatgctgagcaagagaagccaaatgattttgtttatgtgaaattctaggaaaggtaaagctaattgctagtaatagaaatcattatcaatggttgcctgagcctagggaggtaccgttaattgtagtaatgtatgaagaaactttaggggtgatgaatattcttcaccttgattatggttggtctttagacaagtatacttatgtgtctgccaaaaactctttaaattgtacatagtaaatgggtacattttgtgttgtatattggttacacttctccgtaaattagacttttaaagtgagagaaactgaaaaatctaagtaaaaattgaatttaggccactgtagagcacaaatgaaaaatgggtgatctccacttactagggactttcctcattttaatggtaaatgattactaactacataagagtggcagaatggcattccctgaagtcttgctcaccttccacactgattatgagggatgaggaaaacatcaaagtagaatggagactgggatttgaaatactatttggataaaataacaccttgtcaccaccatcgcactttccagtccaatcaactgctaacaattctcttggtgtcagagagattcgtcttgctgtgtaaagactgatgaacttatttcaaattgtgtaccattagatgaaagaggatgggaatgctaatgtgtgtgtaggtcagttgcttgactttggaaatagctgaaaatataagaaaacagcagcaaatgagtgagagacacttgaggcttttataaatagactagactgataatttgggcagatggtgtaggcacagtatttgaatctcagcaaagtatttgactaaaatctctcatgatattcttgaggataaaatagagatgtgtaacacacatgaagaatttaactaggttcataattgtataattatcatacctgaagctcttatgctaggagagttttgtccttactctcctcttgaatatgactagcgcatattcacacattacttagatgaaggcgttagcatgctgatagactgattttttggcaccccactccagtactcttgcctggaaaatcccatggagggaggagcctggtaggctgcagtccatggggtcgctaagagtcagacacgattgagcgacttcactgtcacttttcactttcatgcattggagaaggaaatggcaacccactccagtgttcttgcctggagaatcccgaggacgggggagcctggtgggctgccgtctatggggttgcacagagttggacacaactgaagcgacttagcagcagcagcaaactgattttttaagtgaaaactagaactttaataagctacaattacaggccatgtctcaggactcccctggtgactcagatagtaaagaatctgcctgcgatgccagagacctggattcagtcactgagttggctagatcccctggaggagggcatagcaacccactccagtattcttgtggagaatccccatggacagaggagcttggcagatatacgtccataagatcacaaagagtcagacacgactgagcaactaagcacacataggccatgtgtgcaaaatatgaaatcttattcaagtccaaaaaagagaagtacacaaattttggataagggaaattgttttgtaggagccatgcaagaacaacaactctctatagttgaatataattttaataggagtcagtaagagtgactgtagctgccataataacagtggctgatttaataaacattttttcccaccataaggaagatgaaaggaatttgggttttgttttgctttttctgtttttttgagattccaaaagtcagtgacatcctgcagtatttgtctttctctgacctgtttcacttagcataatgagctcaagatccatccatgttgtcataaacggctggatatcctcattttttatggctgaatactgttgctctgtgtatgtgttaacattttctttatccattgatggacacttaagttgtttccatgtcttggttgctgtgaataatactgcagtgaacgtgagggtgcaggtgtcttgagatcctgagttaaatttttttgacatatataccccaaagtgggattgttagatcatatggtaattctgcgtctaattttttgtggaacctccattctgttttccatagcagctataccaatttatagtcccaccaacagtacataaggattccttttatctactcctcgccaacacttgtcatttcttacctttttgataatagccattctaacagatatgacatgatattttgtcgtggttttggtttgcatttgcctggtaattagtgatgttgaacaccttttcatgtgtgtgcctgttggcacctctgtatatcttctttgggaaatgtctattttgaaaacttgattgattttttggttactgagatgtgagttctttttattttttatcccctatagatgcatgatttgcagatactttctcccctttggtaggttgctttttcatcttggtgacggtttcccatgttgtgcagaagctttgtagtttgatgtcagcgcatcatagtgtgatcttaaaagaatgctgaaaaattgaatcttgcataagaccttgaaagaaacaacatagagaacaaattttactagctgatgtgccagtttcttaaggttaaattgattctgtaggtggatacttttcttcagggaaggagactcctatagaaacctatcaagagcatgatattcatttagtttataacatgttttttctttcctactacttttatggacttccttggtggctcagatggtaaagaatctgcctgcaatgggggagacctgagtttgatcactgggctgggaagatcccctggaggagggcatggcaacctactccagtattcttgcctggagaattccatggacagaggagcctacagtccatggggtcacaaagagtcagacatgactgagtgactaagcactacttttataaatttatagcatctttgaaaggttagaaggagttccagtgtaactgtcctacataatggatagacttttgtatcatctatagtaaagtcagtttattcttgttcccttccttaccctcaactagttatgtgaggtgtggcatcttacgttgtaactggttgatgcttaaggaaatcacggtttagggtcagtctttatctggaatattatgtagggattgagctttgatactcatcccttttttccagctgagaagtttgagtctctcctctttccaaccttccattatatagaccaggatttctgctcttttgctgcttttgttacagaattattgcagaaagagggtttattaaatgagatacaagttagtagagcaatttctaaatgataaaggattccacaaggataaagtagtatttaagttgcagctgatgcaactttggcctgtaatagatttatgccgtttacgattatatatcaccagctcagccgttatatctatatcttcttaattatctagtattttccggtcagaaattttctctcttcaaccctctagttacatttctatctacattattcttggtgtatttctttgtatcaaatttgttgaaaagattgatactgtccatcaagaatacctgtgtcttcccatcttgtaacttcatcatgcctctctattttcatatgtaccacccatttgttgttgttgtctttaatgtcaaaggagccaggaccttttctgtgtactaaatactaataagctaactgaagtcccaaactccaccaccagtatctatctgcttttctttctaatgaggataaggtctccccatcttggaacagcttttgattgactcatttttctccttttgaacctttctatgtcactacagaacttttcaagcatatgaggcctatactgataactgttttctttcgatgcaagagtgagtgtgatgtagcctatcaaactctcagcctaaaaaatcatgacaacaagataatttcagattgtgataaatgctgtgaaggaaataaacagaataatgtaagagtaattggaggagaaggagttggctttgtaaaagcagtaattttagataaaaattttgtctgagaaaaaattttaaaatcttgatctctagatgaggaaattgaagatgagaaagcacaaataattaagttaattatttccaaatgttttattttaaagtgttcattatataattttgattatatcatttaaattttaaagtcttactttaaggcaaaatttatttcctaatagtcatcattagatttcagaagtctcatatatctgtttttcctacagttaaatgaagaaaaataaccttcactaggacatgatgtttatctcattgtcgttgattcagtgtatatgtattaaatgtttaccacatggcaggcatgctactaggcactggggataaacagaaataaaccagacacagctctttccctcaataaactcaactgaggcagtttttaggggtaacagattatttaaatttatcatttactttgaaatagattcactgtgtccattacagtagaaagttcctcactagttttaagaacgtattttaagaacatataatacaacatttaaaagttgttttattttatcaaatggaatttatattccgaatagaaagtgaacataggtgaaaaaaaaaacatgaatcaaactgttacagtaataactgaacaggggaaagatcacttcatttatggttgagtcttgggagaacgtcacttaggagtcaaaatgtatattcagtgttaaggaataagtctcattcagtggagaatagaatgaaagctaatttggtgtgggaggggggatcattgatcacagagatgggattaaacaccaagatatacctaaaggacctggataaataggcgtggctggaggagaaggtttgtattggtgaatagtaaaagataaagcaaagtcattcaatagaaaaaaagattttgattgtaccataatagtaatgtgttcctaaaatcttcagttcacttgcagtctattgtactgttgcttctataaagggattatcacaatgtgcagtttgcagttgtgtcatgattctaaataaatctttgtttacacccctaaatgtgttctatagatactgaggcagagtcgttagccctcctcaggttaaaatgatgttttgtttttcagttacttacacgccaagtcaatcatccacagagacctcaagagtaatagtatccttcctgaacttgtctgcgaagtttgaaaacatcctgaccttttctcctgcattttatcttcacattatgtaaaaccagttttcacgctgagttcaacaatacactggaaagggaatcaataaatgggtttgcacaagagggtagtagtacacgatactacaacctgcttttggtttttgaacagctaaccattgcaaaaaagaaatctattaagtccttatgatggtaggactgtgattgcttgtttatatcctgtaagcactataacatgcatagttttgtagctgtctactagcttctttgagtgccctgaccttgttcagtggtcgttgagatgtaactgatggctctacattatataacaatgaggtgaggcaaacataatgtttcttcttcctccataagcccagattcagatccgatctgccaggtgcctcagtgctagtgacgagctttatagccttcctagcagtgccagaaggatatttgggcctcttttactaaaatctgatggggaagtctcaaggtctcccacaaacttaggaaaacagcttacctcatcttaccatgtttgaggcaccagaaatcctaaaagcaggtcatacagttcaaataacactatttttaaagcatacttattaactttaaaaggaaatgtgaagtactatacttccttttaaagaatatcataataaagaattgtggaagttatatctcatacctaaaatcttcataatgcttgctttgataggaaaatgagacctgttgttttcctttacttactacacctcagatatttttcttcatgaagacctcacagtaaaaataggtgattttggtctagccacagtgaaatctcgatggagtgggtcccatcagtttgaacagttgtctggatccattttgtggatggtaagaattgaggctatttctccattaattaaatttttggcccctgagatgctgttattagaaagtcattgaagatttcaactgtagtgttctcatagttctcagtatacacaaaaactaatgttgatcttattttgttataaatagattttaattttatgtttaggaagaatattgtggaaccagcttcagtatatcttaaacaaaagaatgtatcttttataagcattgcttaagttttattcagaattgtctctctaaaatattttgtgtttagaatgttctgtgtatgctgtttcaaaaaaaaacaagtatgcaatttaaaagtaggtgtgatctgcagccattattaaggtttcaataaaagaactactccttttaagaataagagactgtttcacaatcttttttaaacctaaattggaaagttactttctttagactagaaagaactgtataattatgggcagctgggaaaagaaaaagaaaaatgaaaggtttttaacactgtcagccttgtgtgccctgcatagctccttgttctttctttcttcctatttctgctttgtggaaaagaagagagaaaaattataagaagagggaactaaaattttgttcagttgctttcagcatgctgtgaaaagggcagtcatagggcttttcttaagccagctcttctcaggagggtccttaagaccctttaaggtttcccaaggtcgtcctatgtgagagtagctttttcttcatactgttcaacacatcacaacagattgaatgcataagtgaatatgtgaccatagctggctgctgttaaaccagtcaaaaaggactacagggatttccctggcagtccagtggttaaggctccatgcttctactccaggagtcacaggttcagtccctggtgggggaaccaagatcctgcatgccttgtggcatggcaagggaaaaaaattgcagtattctcacaaagctttgtttttgaaaatctagctttcattaaaaaaaaagtaatttgtcttaacagctaatggttgttttataatttaataaatattttaacagttcctcagttaagttttaatttgctcaatatccgtaggtataatccacataaacagacgcttcttggggttctccataatttttaagactgaaaaatcctgagaccaaaaagtttgagaacctgtgctccaagttgaatacaggatgttccaaagctgttagtgcagttttaagttttaaataactgaatctgcagtaaaactttgggatacctgttggaaaaagcaaaactgcaagggctttcaaagccacatttgcctgaattccctgaacttatctgtagcagttctaagaagaggattctgaattagtcatgataagcctggggttaaatttggctatgatttcttataataactggcattagagtaagtggcaaggtagaagggagttggcattggacttggagtccggaggtctgtactctcgtacttttgactcttaacctgcctgtttcttgacctcctccaagtctttccatctttaacactgagttgaactaatggattttgaatgccttttctgggatttagtaattagagctaggtatatttttctttagtatgtttgttttaatatataattataagcaaactaatcattgtaatctggatctcagacacctttaaggcatataccttgaaacaaagataacagtgtatcctgggagagggtgaaattgcaaaatctacaattgtaaagaaacagttgatacatgttttaaaggtatgtttattttaactagtgtgggaaagttaggctcagtcaagtctccaggtttgtccttttccagaaaccttagattatacagtttatagactattatacattgttttatattttcttttaatttcttgtttgttaatacatgggttcatcctttattccaccaagctgagttttaagacgaaagattagtcagtagtacacttaattgttgagcaaaatccttttgagttgatcctgccttcataaacaagaacatccatagactaggagagaagaatttggtcagaaccaaaggttaggtaagtccctgaattatttacagtggtattctcaatctttatatcttaaataagaaaaccttttgtgaaaatctttatgttactaaattaattgaggataaatcatgcatttcttataaacagatcgcatatgacttttcatcaaaccatctaccaacagcagtaaagtaaaactaaatttcaagaaggcagttcttcaactgttcctcacagaaattgtatcctggctttgaaaattatgtccatatcataaccagcctcttaataatctggcttgttcattacatcacagttgtgtggggtttattttgcactgtactaccaagaacagttatcaagaaaatacatgacaaaaccaagtagatgtaaccttcaccatacccccaccccaccccatccttgactcgcatctgggtctcccatacatctttcccctggtgtttcagaggttaaagcatttgcctggaatgcaggagacccaggttcgatccctgggtcgggaagatcccctggagaaggaaatggcaacccactccagtactcttgcctggagaatcccatgaagggagaatcccatggaggaggagcctggtaggctacagtccatggggtcgcagagtcggacacgactgagcaacttcacttcacttctcaacgttggtgggcattaaagtcatctggggagctataaaaactagcagttgaagctgttccatccctagactctgatggtgtattactgagctggatgttcagaggtgaaaggctgcataggtgattctgttttgcaggtaagactgaagaatgctatcactccttgtaagatagtctgttctgccttaccctgaccactaactgggaatcttgttccagctctttgggccatttttgcagctcgtcctggttttggtatcagactcatgttttcacaaaatcttgttaccctgtttttctaatttcttcccagtgaaacagtccagaagatgcaaggtgaaggaactctttaaagccaatatttaatcagccatctattgtattacatgtaaatggctaataaagaatctagttgtagactatagtaactgaaatgtgtaaaaatatagcaagtatgattaggtctgtatctttgctcaagaagcagcagccaaaagaatctttataccattttctactaaatctacctactgtctgttggttttattaataaagcatccatggcataattatactgcttttggagacaggaaaggcatttgaatgtatcagtcttgaaattttaccatgattgtctaaggtgtgctgagatgaggagattcatttgtaccaatgggaaaacttaaattctcaggtgattaccatagtacttatgctacttccaaatatctcataatgacaggtctagggtttctttcctgagtcggtaatggaaagtgggaactcctcttaataggaaaagtaatgggaaaaattcaaatggcagtaatggtattttgtgtagaaagagggcagctgttaaaattttttaaatcttaataatgtatatggaatctcagtactgcttctctcagagtttacagagcatttatttttttgtttatctttgataatcagttttctttctttggccataaataagagaattgattacatattttccataggttatttaatgataaaaacattgttctgagaattatagtagtttggttttcagtcattatttggttgatgtgaataataaacaagaatatttttctttttatgttctaccaggcaccagaagtaatcagaatgcaagataaaaacccatatagctttcagtcagatgtatatgcatttgggattgttctgtatgaattgatgaccggacagttaccttattcaaatatcaacaacagggaccaggtaaatattcaccatttcttggggttcattttattattcgtcgagaggctccatttcattgtagcaaagaagtcttggatcctgggtaagcatgaaggatagaactcttgatcttgggtctaagtttagaaccttttgttcattacttttgatagtaatggcagcatgtaagacctttgcttgaaataccatacttcagggttgtagtgggatgcacctcttgctctcctgactagaaacagtgctggatctggctcctgcctcgtgaccgcggcacattactgtagcatctgggcttaggccttctgctctgtcgcagactgttgcagtcaggtctgagcaggcactcggctgtgaacttcttgataccaagttcttttaaaattgctgagatttctccctattttttggatttttaaagctagataaatgaaaggactgttatatcatggtttcatttttctgtgataagaattcaaataggagggaattttttacttctctcttcttaagctcctgctctctcttccttgtcttctaaagtgtcagcatagcctccgttcagctctttgtcattttgatcccagccatgttaaattcacctaggcttttaacactggccaagaaaaataaattttctttactgaaattacctcatatacctcaacattttaaaagagtgtgtgtgtgtgggtgtgtgtgtggagagagattgcagcagttacactgttaatatattagagaacaatagttgaccatataaattgggattaaaatagtatttatacatcatactgtgatttgcatgtgaatcaccgggataatttgttttaaaaatgaagatgctggtgcagatgctgattcagtggggtggggtccaggcatcagcattttaatgggtttgctgggtgtttctaatacacacggagagtcaccagtgtaaaaaatctttttaaaagcatgaatgttgtatgtgtttgatcataacctcccaacctaatgaaatgatagtttttaatgtataatgctttctttagtagttttttggtcagcaattcaactgtcagtctttttggtaacactgaagctttctaaagatactgggtagctttctaactaagaatttttaactatcatgtaatatcagagaagtaatctaagttgtcatatgcttgtgtgtacttactgaatcaccatacgaccctaactcaacaatggccttgattctctatcttgaggattttttaaattggctacatttccacctaagtcggtctaaaactaaaatttttaaattgttgtttggtctttctaagtacttcatagctttatttaaaatgttgaattatagctctaagtgttaaaaagaaatctatgacctggcttttgatgacctgattcttttaagcctccatgaagcttagattcagagtgggctaaaatagaagctaaagagcataattgaaacattgcacttactgtccttgtgacagatcctagatcactgagatgattgatttgatgatggcattctggggagcaagattgcctctaatttaccagcttcgtgtgctctgcctcttacagtcttattaacagggtatccagcgtaataccctgtgccgtgttcagttttcctagccatactgttcttctagatgaagtatgagggaattttagtttattgtcagttgatttatcatagagacaaaaaataataaaaaaaattatgaacctaaggtctggatgaaatccatttgtcagtgagtaagtttgttttaataaaataataaagttatattatggaaataagtagcagtgtctccaaaatatggaaaaagcatcccggagttctgcactcatccacttcttggcattttaggtgctttgtcctccatgggagtgtaataaatgctgtgcaagggcttacttcccatgagagaagtgagtgaccaacagaagggtaaggcctttactagttaattctttctggtagtatagttagagccttctggaatttgccagcctgaaaccaagtgtttgatgaagagaaaggatatgaaagaactgtgttctcttcccgccatccccattctacttcattacttcctagtctgttcttttagtggcgcttttcatggaactccctcttactagtcatcctcagtgaagtaaccccaggtagtgctcatccatctccttgatttgatttttctttctgtctttctcatattttaatttccatggctctcagattggatttctgtttgaaaatctaggagtaatctttattttttccatgggagatggtacagctgcttctttactgtgtaatataggcccatccccccatattctcacccctcagaagtctgaggtggcaggttttgcctgtaaattcaagataggactggtcaaacagcctgaagtgatggcagatgttggactcacaacctgcatgacctggccactgtacctctctaggtatctggggttttttttccaattactaaaaataagagattgaactaaagaagtccttaaagttaacaaagatcggattctttcctaaacaggcctcttaactccttgaggaatgaccatccctatatgactttgctgagtagcatgcctttttatttcacttacccgagtgccaaaagtctgagaaattgcttggtcctttcccctctctttatccttctgttttgctgtctagtcaccctattcttacctcttgtagtgtagcttcgctactaaattggggttgataatgtgctcagttgagctaggtatagtgacttttttttctcttgaagcagaagtgctgtgtcatcttagaagaaaacaacataatgtttatatttcacatgatccagttattattgctgtataaccaaccacctaaaatgtagtgacttaaatgataaatctgcagtgtgggtttctcagtgtggaaggtttatctatttcacgtggtattggctgtggtcagttcactggctggtgaagtatctacttccaaaatagcttatttgcatacatgagaaggtatgaccagttaaccagttagctgtcagccagaagcttagtcatggccaagggctggggcctcagttcttctcaacataggtctttctttgaggactttctcacagtatggggaaaccatatgttaggttaggaaaaaaattcactggagaaagaaaaatacaaatattcaatagtttaaaggcaaaaaaagagccatgtaaaacttgcagaacacaagtatggtggctgggttctaagctgcaagatctaaaggagacaggaagtgacaattaccagggaatgataacaagtatattcttgttgttgttgttcagttgctaaatcatgtccaactcttttgtgaccccatggactatagcctgccagtctcctctgtccatgggatttcccaggcaaggatactggagtgggttgccatctccttctccaggggatcttcacgacccagagatcaaacctaagtctcctgaaatggcaggtggactctctaccactgagtctccagggaagccaataagttaatcaacatgcaaactattttaattaaaaaatttgtgatacctactgtgtgggatttagagtgatacaaagatgagtaaaacataggctgtgctctcaggggagttcacagttctattgaggcagtgcaggaagtgatgttgaggatgagcagatgtgtgctccaacaaaacaggagtgaatgggagggcagggataccaggagtgcgagtatagacgtgtagactgaggatgaaagtaaccagtcccagagtctcaaaccaagctgttgattctgtagtataagtgccagtttaatttcctatccatgaattacatccaggaaagaccgtcccttaaaagtttaaatcattgcaaagaatgtaattttcagtgtattatattgacatttccaaaaaatgcaattatataacttttaaatgtaccaatttaagtcatactttatttcgatacttaccatcattacttgtttaaaaaatataaaacctcttcattaatttttataagttttggaacttcatggccatccagtggttaaaactctgtgctcccactgcaggggacacaggttctatccctggttggggaactaaggtctgcacaatgcagccaaaatttaaaaatttctgcaagttttacatggctctttttttgcctttaaactattgaatatttgtatttttctttctccaatgaatttttttcctaacctaacatatttttatgctttaaaacctcttattgatcactcaaattatatctctgcaacaaaaaatacggattttaatttagagttttaaaaaaaaagttgccagtgaccttaagctctgttaactttttaaattccaaattatctattaacaattattaatatatacctgatgaaaataacatacgggttttgataaatagaaacaggtaaaattttattggaaatgtgtattttaatgaacaacatgggattttattttctcttcatccatatatttgtgaaaaataagacttgctagaataagcagggacttagcatcagtcctttttctagttttatttttaaagaagtgctgagaaatattgttcaaataaattaaatattaataagagtatgggacagtcagaagttttgttataactgtatgcagagctcagcagaccaccctcaggttcagtaactcattaagtcttacagaactcactggaagttgttaatactcacatgatggtttattaaaacaaagggatacaggttaaaatgagccacaggaagaggcacatagggcagaatccaggagagtgtcacatggagcttccagttgtcctcttccaatgcagttgtggccagtactaagttctggcagccacatgtgacagcgtgcagaaggtattgccagcgaaggaaacttgctagagtcttggaggccagagttattctcaggcctcagtcacatagatactgttggccaccttagttttagcccctgcagaggtcaaactgataccatataacttaaagccctctctgctgctgctactgctaagtctcttcagtcgtgtccaactctgtgtgaccccatagacagcagcccaccaggctcctccatccctgggattctccaggcaagaatactggagtgggttgccaaagttctctcagtaaatcacaatgatagaataagactgtctgacatgatcttagactcccaggtaaacaaaggcactcttatcaggcagaacattccagagctcagggattaccttccaggtggtgctggtgcttagaggggatcttcccaacccagggactgaaccaaggtcttctaagagccagccctccctgtgggcgagattaattctttaccacaactgggtccctggttatttgagctctttctgtggtcatagtttagctgccaagttgtgtccagttcttgcagtcccatggactctcgtgtgccaggcttctctgtccatggcatttcccaggcagggacactggagtggattgccatttccttcttcaaaatatataaatatatgcatagaaatactatagttttattaaactaaaagtcatagcaagttatttatttggagaagagtcattaaaattgaaaattctatctttataaaaccaattatatttcactaaaatactctaaaagttgaatttaattttcaaaagaaaacataagaaaatatgtatctgttctacaagttgatcacataaaaccatcttaaactatttcacaagtccccaaaataacaagacttgtcaactttcacacagattatattatttgacctacttattgcttctattgaatttcttctttgctttattaaaaaacagaatttaattaatgtcagtaaagacaaagccatggctaacaaacacataaaaaatgctccgcatcactcattatcagagaaatgcaaatcaaaaccacaatgaggtaccatctcacaccagtcagaatggccgctgtcaaaaagcctacaaacaataaatgctggagagggtgtggagaaaagggaaccctcttacactattggtgggaatgcaaactagtacagcccctatggagaacagaatggtgattccttaaaaacctggaaatagaactgccgtatgacccagcaatcccactgctgggcatgcacaccaaggaaaccagaattgaaagagtcgcatgtaccccagtgttcatcacagcactgtttacaatagccaggacatggaagcaacttagatgtctggcagacaaatggataacgaacttgtaatacatatgcacaatggaatattactcagtggttaaaaagaatgcatttgagtcagttctcatgaggtgggtgaaactggagcctactatacagagtgaagtaagtcagaaagaggaacatcaatatagtatattaatgcatatatatagaatttagaaagatggtaatgatgaccttatatgcaagatggcaaaagagacacagatataaagaacagacttttggactctgtgggagaaggcaaggatgggatgatttgagagaagagcgttgaaatgtgtattaccatatgtaaaatagatgaccagtgcaagttcaattcatggagcagggcactcaaagccagtgcactgggataacccaaaggggtggggtggggagggaggtgagagggggttcaggatggtggtacacaagtacaccatgcgtggctggttcgtgtcaatgtatggcaaaaaccaccacaatattctaaagtaattagcctccaattaaaatcaattaattttttttaagtctgtgcaaggaaaagagacaaagccatggatcagaagcacatggccataactgaagattttatgaactctcacgagggaaaaatttgctctttgaacagtaagaaggaactctataaaatgtaactgagaactgttcaacaggttgaaagaggccattggaactgacaaaatgtttcttaaacataaatgatcaaacaatgaaactacataatatctcctctggctgaaacagtcaagaagtttaaagtgcttaggttaaaaataaaatcctagtaaacagtgaggacttactgtgtaacatacggaatatcttacgataacctgtaatggaaaagaatatatataactgaatcactttgctgtaaactagaatctgacacggagaaggcaatggcaatccactccagtactcttgcctggaaaatcccatggatggcggagcctggtaggctgcagtccatggggttgcgaagagttggacacgactgagcgacttcacattcacttttcactttcatgcactggagaaggaaatggcaacccactccaggaacggagcctggagaacggagaatcccaggaatgggagcctggtggacagccgtctacagggtcgcacagagtcagacacgactgaagcgccttagcagcagcagcagaatctgacacaacactgtaaatcactacacttttctattgcataccaaaaattatttaataacttgttgttaaaaaactattttaataattagctggcaattcagttgattttgctgaaaacaaagaattggaaaccagttgtcttacaaagcgctttgctacccattcattagagtccagttagatagcagtatttgaaagtgtccctttggtaccctgagcagttttacaccttggcgcagtgtgatatatgcaatatattgtgattgcaatatgtcacacaatgcagtgtcatttatgcaatacattgtgatatgcaatatatttaaattgcatatgtgtaaaagatatgcctgttatgaagtgggagaagagcagttacaacagagaagatgggaaaggaggtaagcaaaattaaactaacttcactttggtggtgctcgggcaaatcagcgtgtagttaaataagggttagtacagcaccaaaccagacataacataaagtaggatatcaaacttgactgttcctaaaattcatcaattctgccctgaaaccaaggatctctgactgcctctttccaccttaggctctgttgtttttcagtagctaagtcatgtccccatggactgtagcactccaggctcccctgtccttcaccatctcccagagtttgctcaaattcacgtccaatgagtcttgtcatactatctaaccatctcctctgctgtcctcttctccttttgccttcagtctttccagcatcagggtctgagcatccagtctacccctattgaacctgttccctctaagatcaaaatccctctcttctccctaagacttaagactgctaacatctgtctttacccactttcaaaagaactgcaagtcagaaaattagaaaagaaagaaatcagaaaaattacaaatctctgcacacagggaagataaacctttttactttgttaaacagaagatgttagttcataattcaccttctaacctctggaggagactctgattctcagacttacttaactcaatgccccattagagtttcctcaacaaaagagttcaaagttcagatgccagaacaactgcttaacagattaactttggttaaccaaaggttaactcttggttgaatggaagaggtacaatctgatctgtgtttcagaatggttacccaatcagtgggaaaatggactggataaggaaagactgaaagcgtgggaagcacttaggagacctttgcagtactcacgggatcatgaagatttcagcttgcagcacattaagtattgattccccatgaagtgaagtcactcagtcgtgtccgactctttgtgaccccatggactgtagcctaccagacgactctgtccatgggattttccaggcaagaatactagagtggattgccatttcccataatctatgatatagaagactctgaatactagtggcattgtgctttttaattttttatataagtgtaatgtacatacagaaaagtccatgtcttacgtgcacagcttgttgaattttcagtgttttcactgatttacaagattatatgatttgccttttttttttcctccccagataatttttatggtgggacgaggatatctgtctccagatctcagtaaggtacggagtaactgtccaaaagccatgaagagattaatggcagagtgcctaaaaaagaaaagagatgaaagaccactctttccccaagtaaggaaaagctttatgttacctaaaaggacagactgataattctaatgcagatttttaagtacttttttggagcacagtttgtatttcacagatttggattacttgtgattatgtgcagactcatataagtaaacacattattattaaaggtgatttataaaggttgaacctagtaacttaggatcccaatacaaaatattcagaaagcttttgcttttgtctagcagttctcaaacgttttgatctcagaaccattttctacacttaaaaattattgaagacccccaaagactttttgtttttgtaggtagtaattcccattttagaaattaaaactaaggttttaaatatttgtttataaatttacttaaacatagtaaaaccattacatgttatataatgttttatgaaaaaatgtattttccaaacaaaaaaaaattagagaaaagtgacatttgttttatactttctcacaaattgctgcaaaaagaagacagctggattctctgctttgcattcattatgttgtaatatcttacattatatagcctctgaaaactccacttataaagcaatgacagtaaaaaaggcaaataatatcttagtgttagtgcaaaaatagttttctacagactacactttgtgtactgctacttttattcttcttgacaataattgcaagcatccttctaatactaggttatttgaagaggtatttttacctggggcaaaaagagacggcagctcttggtgttgtctgccattctctaactcttggaaactttccacagattctttacaagttgaaaggctaatagacttaagttaatgatttttcataagcctcatgaactggaactaagtacctgaacaagcttagaaagtttagctgtagtaggtatggtcataaaaattcagtgttttataatacctcagaaattcatcatacgcaatataaatctgtttcagttaaattcattggaaaaggaaatgggctgccgtctatggggtcacacagagttggacacgactgaagcgacttagcagcagcagcagttaaattcatcatacgctgtataaatgtttcagcaagtcggtccagatttcacgtggaaagtgctgacttccataactcagctacgagaattactgacttggtcttttgtgaatcttatgcctttgagtacccagtcctagctaagtttcttggaagtcagtgttacagaaatatgtgagtcttttattccaactaaagaattaaagatagaatttatgcttttaaccagtctctcttgtcccagagcagggagggaaggctgaagggctgggtgggtagatttgttttacaaactggaattctacattgctattcctttgagggagagttggggtttttttaaacccaggaaaaccactggcttatgactgtcgaagtaaacaaccagtattgttacaggtctctgcaccgtgttctcgttttcacatcccaggtgctaggcccccctgtttaacgtggttgatgtacattaataatgcagattatatccttaggctcacttttcagatggtattaaaagggacaaaatggtcatgtttctaaacataaataatattttactcttttcatggtattaggaaatgaagtccatatatgaattccagattattaaacactgccactttaagtacttttttcacattttcattataggctctctgttcccaccatacacaaatttcagatggccaaaggtttacatgtaaaaaacaaaattataacaagtgatttttacaaccttaaggtaggaaaggctctcctaagcaggagacaaaattcagaagttatcagggaaaagattagcaggtatgactacattaaacattttacatctctatatagtaaaaacaatattgaaagataaacgctgaggaaaaaaattgtagcatgtataataaagagtgattatgttatacagatccataagtaaaggtagacaatagaaaacaaacaaaaaatatgcactggtgattcacaaaaaaaatacaaatggtgagtgaacttggcacaagatgttaagaattcagtgataatcagtaaaatacaaagtcacaactgtgaaatacatttttatttttgtctctcagattaacaatatattcagcattgggaacaatgttgggaagtgaggaagagcttttcttttaaattttgttggtaggaatataaattggtttggccttttgaaaggacttggtagactccataaacttaaaacacatacaccttttgctctggtaattccactccaagaaatctactctgtatgctacaaaatctgcttccaagtatccagatagatactagactgttaactgtaataggaagaattaaagacataaagatcaaggtgtctgtgtagatggcttggttatcagtgaggggaaaagaaagtaatgccgaaaaatgtgtagtgtgataccattttaaatggtgatgagggtggggctgggctctgttttcatatgtgcatgtttatgcataggaaaggtccagaagaaagtatagactctttaacagtggttacccctggaaggtacgatttatacttttctgtattatttgaatttgtatttgtgtgttataattttaaaatttttgtaacaacgcttacttctttgccttcttatactaatcattatacagatttcatttaactttaaaaaaattttggtggctcagaaaaataataattagtatataatgtatagaatactactgtatagtatataatcatagtaacaatcattgtggctgctaaaattttattgagtactttctatatgccaggcattgtgccaagctcttcatatgtatgtttcatgtgttaccatgctgtgtgccttcaggagtcgtaacctgtttctttgtaccttaaaaatgtgctgaatttctacattttgtttattagtgtctatttgtagagttttcttgtcttgttttttactcatgggtcatcatctgtcacttctcactcctatggcactaaggtcattggggccctatttttaattatatgtgtgaaagatacttcccaatactaaatttctttaaagaatgagttgctctgatggttctgtttatgaagtcatatagtgctttagttatttatgctccatcttcccaaaagggacttgcggtctgtgagaaataggtatatagttgatcttaaattttttattgtttactattccaaggctggcaaatgatctaaaattataagatgtaaataaaaactaactatgggtttcttttctcattcagtttatagagattaaaagatctaatagttaggtaattttctcttcttttaaaggaaaagtatgtttctctagtacattccaggcatttggaattacagtaaaaacaatgtaagatttcatacactttcttataaagtataatggggctcttaaagattaacaccatctacattttcattctttttttccttttttttctttttttagattctcgcctctattgagctgctggcccgctcattgccaaaaattcaccgcagtgcatcagaaccctccttgaatcgggctggcttccaaacagaggattttagtctatatgcttgtgcttctccaaaaacacccattcaggcagggggatatggtacgtttcctgttcactgaaacagagtgagtgagtgacagcgtgtaggagggtagggacaaaagaaagtgaacatatgtttgcttatgtatttgttaaattgaatagtattttctttttctttaaaggtgagcaaaagaacatgtatgtttttaaagtctggatatagttttcttcccagtgtaaaatccgttgttagcattagattttcaacaccgaattttttttttaaattcacagacattgctgaaaatttactgttccttttccagaggcttcacttcccattccaagtttgttttgtttacttggttagtctaatcattaaacgttagttaaactttcctcacctaccttttgctgttagctctcccgcatccattaggggctccaagaatagcactatctgtgtgtgtgtgttggcaggtgggaagctgatggtaagttaggctgtgttagtaaaggtaaactgaccaggtctaattaggagtcactagaattgaataagcttatttttattaatattcttcttataactatttctttttgtaataatttaggaaatataattgttctttattcccttacagcagtataaattatcagtgcaggtaaccaaagatattactgaggagtggcatgtttgacatgagtgacatggttaaactttgggtttttagttaatatttctttatatattaaggatgtcttatacattatagaagtcaaatttgctgacaaaagtattgcctcctcttcctcccaaaaagcacagcagaattttctgggaacttgagggattgtttgttttcttttggataactgtggttgccaaacaaccaagtacttggttttcttaaaattattattgctttagattatactcacctctcatgatgcctgttagcaatcacttcatccatgtgttttgtaaaatatctttcctccttatagtctttgcccaacaagagtctacttgttatgaacgaatgctatttctgattccccagtataattagtatgtttagtgctttctaggacttccactttcttgtattaaaaaaaataactaatgtggcagtcagtatactcttactgtgaatcatagtctttactgggaatcaaagtgaaagaagcagcattgctgttttgacttcagtcagcctagggaccaaagcctcttaaaaacaccttcatttactcagtttggatttgtgatgattttcattatagctgacagttcaaggttattcagtggcacacggatagcatctgcataaatgcctttcttcttgaaaataaaggagaaaattgggaagactttacactaatgatagtttagtctttaagtaccacagataacacacactgtaaataaaattttgaaatattttctttaagtaagttagacttcatccagggaaatcactcactgataggtttgacataatttttgcccatcatttgggtagcttaagataaacaataacattcatgcttttaaaaatctattcataacttttagtttaggaaaagaacatttcttatattttaaaaaatgagaataagaaaatcataaaagaatgtgacttattcaaaaacatcaaaattcatgatctctaaattttccaatgacactaaagatacggttattagtaactattaggctggggtttatttatttgtgaattgacagcaagcatgtagctagcaaagtttttacaaaattgacttcagtctgtggaacgtccaaacgtttgggccagagtcacatgatctttctgttgatagcgctctgttatagtttcccagcatagtttcttcacgtttatcttcttgtctttattcaccctctttttccctctaatgctacccctacaccaacaacacccagccagcgctccacctctgctctgactcttttccttcctctttaccagtctcttttgccagagggcattgctaaactcttagaactgctcagaaaacttattataccaccccattgacatttgaacatgccttcacagggttacatggtaattctcttcttcccaaattgggcccactggaaatgttattggaagaacattagaaatgtagcaggtgaaatacttaaataacatggatacggagaatgaaacatggtagttttcctttctgttgttgctgtttgtttgatactgagttttagatgtgtttgttctccaaacaagaaaaacattttcctaaccatgcatagcgttaatctttttggctaaggaattgaaacagaaggaccaactttgatgctcttgcgactgacagcttctttcctaaaacctgtacccttgaatattttcattacagttgatttccttcagaaggcagcctttttataaaatattttacattttaaaggtttactagtcagtgataaggaatgaggtttgtctttttgattttaagtaatttagggatcacagcatttaaataaaatacttcaggttttttgtttttttttttcagatattactgtattgttgtaccagccatttaaatcctaagcaagtagttaaactcattctctctaaagtagtgactgtttaacacagtagcttatatggccttcctgccaaatggatcagtctaaatgtaaggaaatcatctaccctttttttaaagtattatgaaaatacttcatgacaaaaacattttgtcggttatagtcttattcgagaagtattgagcatttctaaaataccttttctgtgatgatttctctaagaattttaaaaagttcagtgtgtcagtgccagaatgttcctcattttttttaaactgcctgaaaggtcaccagaaagaaagaatgggacttactcttatttcaaatgactgcccttctacatctaaaacagggatttatttttgtacaaaagaacattaggtttttcctagactattttatatttaagaaatttttatcaaattatatgtctaacagtcactgaagtacatttaactctggaattaagagtgattatttagtaatatcttaaaactagttaataaagtccatagctttcaaacaaacaaatacttgatatttgaggttgaggtgtctgaaatcttggggtctttccaagtgttttctgcctttttcctaaataaaatcaaatggaaaatagagcttaggttattctcaaccagaaaggaggtttttaaaaaattttattttgacctctgactgatttttggttaataattaaattaatatactgagattttttttaaaaagtcagaatatctagatgtttcattttgaataacttcacagaagcagatttggctcttacatcaaataaaaatagagtagaagttgggatttatagatttcctgatatacaagaaggaataagcaagaaaaaaggtttgttttcccaaaatcatatctattgtcttttacctctgtcttttcttaaattgtctgtgatttcagaggcacgtagagttttagttattgatacctaaactatgagggtttttttttttttttttatattttggttttttggccaagaggcatatgggatcttagcttgagaaagcaacaattttcttgatgtcattttgggtgagggcacatattgctgtgaatagcatgctgatagccaccagggaccaaactcgcacccgctgcattgaaaggtgaagtcttaaacactggactaccagagaaattcctacactatgagttctttctgtcatcccctccccacaccctctaccccaacctaaactctgatgatgaaatcaacaactattccattagaagcagtagattctggtagcatgatctttagtttgttagtaagattttgtgctttgcgggattatgtcgttttaaggctgatatttaagtttgtcaagtagaatgctgttcaaattgtaataatgagtaggaaacacctgaagttttttttttttaagttatttttaacatggtatatacaattgagcttagagtttatcattttctgatattctcttaatagatgaattccagccagtttttataaagatttctgttaagcaaatcctgttttcacattggcttcctttaaggagttttagattctgctggatatggtgactgctcataagactgttgaaaattacttttaagaaatgtattagaatagttctgaaaaaaaatagcaaccttaaaaccataagcaaaagtagtagtaaggatgtataatagcctcctatggttgtactttaaatgttttgctctccaaggttttagtaatatggctttttttctaatcagtgccaaactcctccagttcttttaactttaaatatgaggtaataaatcttttacccttctttgatcttttgacttacaataccttggtcaattgtttgttaaaaggaatccttaaatggaaagagacaatatcagtgtctgcagttctggttagtagttttattcagaatggaaaaacagattatgcattatggaaaattgttcaggggtatgttcattgttaagaccttggactttggagtcagtgcctagctatgcattccaggcctgccattttctggctgtgaaattttggacaagttacttaaccactttaaaccccagctttaagaagtaaattaaccccagtaaattaagaagtaatagcatccgcttcatagagttgttatgaggctcagatgcagtgcaaatgtgtataaagtatgcagggagtcacctggtatactataatagacactagaatagttgctaatatcatcagcataccatctgaggattctgtcagccaatcattagcaatctgttgtttgttgggacatgccagtgttctccagctgaaatcagtagcaatctaaaaatggatagattattcctcatttaaatagtgtattcatataagtgattgcttggatccttatcagaagttgctgttactgaaaaatgatgttaaggctgactaagttgtgatagttgtcagttactaaccagctccctgaaatgaataagaggaacctatttctatttcctagtagaaggtatggacaaaatagtaggtgaaaaacaatgtcttgaagcccccaaattcagtaagcttaaaagacctcaaacggtctttgcagtttaaaatttgtatgctgagactgatgttcattgacatgtgcctatatgtaattttttgatagtttaaaaggtgaaatgaactacagatgggagaggtctaaattttctttccttcagtcaaatgtgtaatgtggacatattatttgacctgtgaattttatcttttacaaaaggagattaattcctgcttcttccttcctgatagttgcattataatcatgaaaatgagttgataatttggggggaaagtattctacaaatcaactttattgttttaccattggtttctaagaaattttgttcatttgaactgtttatagcttgattagaatcatagcatgtaaaacccaactgggggattatctgcagacttaatgtagtattgtgtcagttgtcttctttcatgatttcaaccatttttgcttttgtcattgctagatctgtagtatacagctagtcacctttcagcgaggtttcagcaaggcttttctgcatctctaggttatttgagatcacttttttaaaattagctcttgtcctccctctacaggagaatttgcagccttcaagtagccacaccatcatgacagcatctactcttatttcttaagtcttgtgttcgtacagtttgttaacatcaaaacacagttctgttcctcaactctttaaagataaaaattttcagtgcataagctggtatggaacagaaggaaatttcccatccaacaaaagagggaagaatgttttaggaaccagaattctctgctgccagtgtttcttcttcaacacaaataccacaagtctgcccactcccaggaagaaagaggagagaccctgagttctgaccttttgatggtcaggcatgatggaaagaaactgctgctacagcttgggagatttgctctgggaagtctgccagtcaactttgcccttctaaccaccagaccagtatgtggctgatcatctgatggggcagttgcaatcaccaagcctcgttctctttcctgttctgggattgtgttgtggaaccctttcccctagccgccactgggtcatttctgagggatggaaca

SEQ ID NO: 159 - DNA, 38836 bp, Hippotragus leucophaeus
  source 1..38836: mol_type = genomic DNA
caagccagacagaataaaggcagcacggcatttggcttttgaactgagttcaaggcaattaaagtcatggactaaggagggaaggagggggttcagaaataccagtataataagtagtatgactggagcgctccgtcaattaactcaattagacaaagcctgttttaaccggggaaggcggcgagaagtgctcccctcattaaatctggctattagaggagcttctgatggaatgaaatttgttttagcggtttgcatcacataaagtcgtctctgtgtgtgcatgtacacacgagcacacatgtgggctctgtaatttttgtgggtctttttttcaagaggagaggaatagaaggcagatccaaaatataccccctaaaacgaaaatttcccccaaatcaaaaagcgggtgaatgcccaagagtggaagaccaggagaaagctggagagaagcaaggagtggaaggcgagagagagagagttctcccggttctaaagccatgagcccccttgggtgggggcttctgctcggctgtctgggctgtgcgctcccgtctggggcctgggcgcagtttccccgggtctgcatgacggtgggcagcctgcgggccaaggaatgctgcccgccgctgggcgccgaccccgccaatgtctgcggctcccaggagggccggggccagtgcgcggaggtgcagaccgacaccaggccctggagcggtccttacgtcctgcgcaaccaggacgaccgcgagcgatggccccggaagttcttcgaccggacctgcaggtgcacaggtgagcaggccggcggatgtgcgcatgcgcccagttgggtggggctggcccgctgagggaggaaccccttccaaggcagagatgctcagcctaggctttgaaaggcaacccaagttggtccattggcattgaataaggctgatgtctgggtatattctgcacaccctttagtagatctagttatgagaactaaataaatattctgtgggacacgctggttctatgaacgagtgccagcacaccatggacttgtctgttggcgagggaagccagagagccccagagtcagctttgaaactcagagcaagtcctttcaagatggattcagtgccctctccttctgagatgggtttgcacttgttgaagagggagggcgggtgattcttggcatcggtaagacagatgtcggggggtggggtaggtgttctgaagttcgagtctcagcatttctgacgatctgaacaggtctcaagcaggatatatcttgctcgtgaaggttatgactggcttgtaactctgccatccttggtgagatggacggacaaagctgaagaagggaggctagttttagataacaatggcttttttcactcctgtctgggtgtgatttgagcatttcagaatttatgcagtatccctctttcagaccttggtctctcttattacctgtttttttttttttttttgaaatctctgtgcacttcttacttctcccgctcttcggagccttctcaaatcctctttagtggggctccccttcagtgttcagcaaacatgcacagcagtgataacactcaaaggctggcagggcatgtgaaacacacacacacaaacataagcagcaactttagcaaagcccttggaaactgttccacagtgtccagctgcctaagaggttttccttttaaattatgtttttattgatgttatgtgatactagaacataggagaatatagataactgagctatgtaaggacatagaaaggtaaactaagagaatgtacaaagagctgtgatgttgatgtaagaatgagatcagatttctaactgaaaattctgaagctattttttaaatatagaatggagaagcaaggccctttgtatagcacagggaactatattcaatgttgtataataagccataatggaaaaggaaaaaaatctggctttattatcattcttttgtagtcatattgttaattctctaattcaaaggatttgttagttttgtcttggggtattaattgtgacaaaatgtttgtaatagcatgttgaatgtatactattcatttttttctaatctaattgagcacttgcttctgtagacattatctcatagattctcattgtttttctgtctaatgagatgcagcaggtttcatattacttgtgggattggaaaccacactacacagtgacttctttgttggtgactaaaaaattcttctagaaagcttatttccaggtcagtcaatgatagagtgccacaagttagaaacttgggaatctccattttatggaatcctggcagcagaagacatcaggaactcaggtataaccattaactctccttattgctgcccatgcctgggcttcccaggtggtacagcggtgaagaatccaccttccaatgcaggaggcccaggtttaatccctgggtcaggaagatcccctggagaaggaaatggcaacccactccagtattcttgcctgggaaaaccatagacagaggagcctggtaggctacagtccatggggtcccaaggggtcggtcagaactgagcaactgagtacatgcacacacgtcactatctgacctgactaggaagttttttaaattttttaaagtgagatggaaggaatcaggggtggcagaatagaagagataattgcagtctccttgtcccaagggagtacttacaaatattccctctagaagtggcagtaacttagggtcacagtgacctactttcaaaatgttctcaggaggatgtgtgtgctcaatcgctcattcgtgtccaactctttgctaccccatggactgtaggagccaccaggctcctctgtccatggaattttccaggcaagaatactggagtgggttgccatttcctacttcaggggaatcttcttgacccagggattgaatccgtgtctcctgcaatgacaggcggattctttaccactgtgccacctgagcttcttaggcaaacatacctaagaaggcagtgggccagaaacagggcctgacctgtaagtccagaaggacatctcatatctgtagaccaatcaaaggaagcagggtgtatagtctccttctccagccatagtcaagaccaggactgtctcttagaaccccttgtctccctcctccaggatttgatctgtctagactcattcaggaccatagctctttccatcccagctttggattgactccacttatgttggctagatggtctttttctttgagcctcaggacaccagactaaatccttagtgattgggctggacaggtatttcgtatatccaataatcactgtgatgtgtcatatgccccaaagcaagacacacgttttttcagtttattctccctaaagagtgaattgcttgctttcttaggctaatttcttcatgatttaggaggcagtcttcagaagttaaacctgatcttcagtgcccaaagtacacccctcaccaccactgtaacctcaaaattctttggcaagtagattcttctagtgtcacctcaaatttattaatgaaatgtagattagcaacaagactgttgatgaccttggaattttgttaattctatggaaagataaacacaccattcatctttaatggacattgagattgtttcttcatcttgggcattgggaataatgctgaaatcaacacaggaatctcaatatctttgtgagatcctgatttacattcttttggataaatactcagaaattggattgctggattgtatggtcgttttatttttaatttttgaagaaccttcatactattttccacagcagctgcatcattttgcatttccatcagtagtgtgcaaggattccaatttctttgcatcctagtcagatggtatttgcaatttaatgctattcagccctagaaaagaaggaaattcggcagtatgcaacaacatgaatgaaccttgaggacattgtgctaagataagtcagccagagaaagacaaatattggataattctatgtacgtgaggcatctgaaatagtcaaattcatataatcaaagaacagaatagtagtcaccaggagctgggagggaggggaaataaagatttagtaatcagaggccataaagtttcagttaatcaagatgaataagatctagagttctgcacaacgctgtacgtagagtcaacagtaatgttttaaaacaattaaacacgtgttaagagggtagatctcacgtaaagtattcttagcataataataataataaaaaaaacacccatagtccccacgatcttgaagttggtaaaggattttagctcaataaaaataaataaatgcaaactcagatgggaaaaaaaaccccctacattatgtgctcaaattctctagagagaacttttgtattctctgtgggaataatttcaagctgaaaaattattgaacttaattttcaagaagagcttaatttcaggagatcttggcatcagcgattcaccttccaaatcgcacctgccaattggcattcctgagaaaagactagttgcagctgtgtctttagactttcgaaaaacacgtgcaccaaatggtttctgaacaattgtctgagaacttcttgtcgtacaactaagtgcctccatcttccaatctctaaaatggggataatgatgaaaccacacttgtaaaattcttttgagctctgtagatgaaaggcctcatgtgagtgtaaagtattgttattaatataatagaatctctaattaaaaggaataggctatttagagctccttgtaaattcactaatccgtggtctttaaacttatttagtctaataacctttggaggttgagctgatgtggttcatgtgggaacatgcaccatttcgttgttctcattctttttccatttttatcctggtcctaggtaggtataagactttgtctttttaaatttcatttttgctcaaggacatactaaataacagatagactgatatctagggatcttttactttttctctctccactccccagtgagataatgcaatccttcctaaagggtttcctttttttttttttcaactgttgctattggtggattaatggagaaactcaactcattaaattaatgtgagggactgctaggaaatctaagttaaagaaataaacattttgtgtggtaaggttttatgttactgcatttttcagttgtcttcaatattttaacaaattctttagaccaggtttagaagcacaaatatgaaagagagctgactgcagagctgtggggtgtgttttctctgagacatgctgggaaagggatttttaaaaagtcaaatacatttctaggtagtaggtgagctcaaatccacacaaacgctttcttattagcatttctgcattgcttttcgggggcaactttggctttgtgagaagagatggctttgttcaacacaactgtgaaccatctctaatcttctgagtcagaatgaatcatttcatcttctgtcatccacggtgctcagttaattcttgttttcacgtttcccatcgttaggctggtgttgatatttcatcacactcatgttcctcataccactagatgaaggcaccgagcctgatttatatttatatcctctagcacttaatgccttttattcagttattcatgactccttcatcaaccacctaaccaatgtttatttagcacgaattatgttaggtccttcagatattaaggggaaaaccccaacgcgatttttgatagtccaaatgtgctggttgagtaagacaggtatgaagacaaatacttaaagactatgagatttgatcagtgataacttgtaaaactagtaatgatgatgcttcatatataacttactatgtgccagtactgctctatgttaccatgattgcttcctgtaagaaccctttattccaataggacaggttttgagaggtcaagtccatagtaatcaagtgtggcagttgtatgactgtacataaatatgtgggtgcacagagaagggactgtttaattttgacctttctttaggtaataggtgctaataaattatttgttgagagaatgagggagatagttattggtgatttagtttctagcaaccataaagaatattggtagagaaaatgcagagatcttaaaactcatggcctaggtcacaaattactcagttttaataatgagatatcaaaattcaaagacaaattttattcctttaaatctaaaaatgtattgaatttagtatttcaaaatttgtgcatgctatttcttagcatttagaaggaagcagttgctctcctgttgtagagttgtaactgtattttcacctctgatcatctggccttagggaaacaactggaagtttgggtatttagtattcttcacatgcattttgttcaatcacttcttaaaaaatactctgctcctatgctgctgctgtcatttcagtcatgtccaactctttgcaaccccatggacggtggtctttcaggctcctctgtccatggggattctctaggcaagaatactggagtgggttgtcatgccctcctccaggggatcttcccgacccaggtatagaacctgcgtctcttatgtctcctgcattggcaggcaggtgttttaccactggcaccacctgggaagtccactctgttccattagaaactgcgaaattggagggatgtatttcaattaagatgttttaaaaatagatattatgcagttatagtaggcaccccaagggaaaatagatagactccaagctccatgaagactgaagtaccttgcataacatctgatactgtagtagccattgaataagtattgattaaataatttatatttaatagcttcacctaagtgatcaacacaaattttaatgtttaatgtaaactgttcaaaaacttgattttcagtcttgggactagtagaatttttcctttgaactattagtttaaaattagtttttcatttggtgttgaaacaggaaaatgcaaataaagctaagtaagggtaggtaaggggcttcccgggtggcgccagtgttaaaggacccacctgccaatgcaggaaacataagaactgtgggttctatccctggcttgggaagatcccctggaggagggcatggcaacccactgcagtattcttgcctgaagaatcccatggacagaggagcctggtgggctacagttcatagagtcgcaaagagtaggacatgactgaagcgactcagcaggcacgcacacaagggtaggtaaaatattttgtatattacaaagagcatcggactaccccccctcaaattcttcctacttatgatatttttaaggacatttcttttaaccatcaaaaaatagcagacagtatttttttatacaggacacacgctcattttgttttcacgctgttgaaaaattttcttttcctttagagatccaaataaccctcttttttatatttttatttatttatttggctgcgttgggtcttagttgtgactcttcactgtgtcatgtgggatctttctttgtggcagtgcggactctctagttatgctaccggagaagtcaatggcaccccactccagtactcttgcctggaaaatcccatggacagaggagcctggtaggctgtagtccatggggtcatgaagagtcgggcaagactgagcaacttcactttcacttttcactttcatgcattggagaaggaaatggcaatccactccagtgttcttgtctggagaatcccagggacgggggagcctggtgggctgctgtctatggggtcgcacagagttggacacgactgaagcgacttagcagcagcacttatgctacacgggcttagttgctccttggcatgtgggatcctagttccccaaatagggattggacctgtgtcccctgcatagcaaggagggttctgggccctaaccctctctttaccatggtcatagtatgttttacttacatctattttggtacttgcaatttatcaaaatcacttgcagggcctgcttttccttctgattcacaaggacagggagagaaaggaagaagaaaattgagaattattgaatccatctgctacatgctttttatatcctttttttaaatttaaaaattttaaatttcaactttattgacatataaatggcaaataaaattgtaagatatttaaagcatccattgtgatgatttggctttttgctcctttcattcattaaatgaagattcattcgtccaaggcccgcataggcctaggcagcaggataattgccttctaggtgcctgtagctgagccagtagatgtctacaatcgccacaattaattcaatgaaaaaagaagtaagaggtgtcatgggagcacagctggggggtcatctgaccctgatgtgtgggatcagggatgtccttgtagagagctcattgtgcagcttaaaggaggagtagttaaaccaggtgaagaggaaggtaggaagactgtgagggaaaagtgttcaaaacagaaggaagagccaataaaaagatctgggagcaagaggaggagaagacagggaggtgatacattaaatgtttcccacaacccctaggagataagttattgttctcttttgtttcaacacacaaacaatatttaagtgtttactctctaactgatcactacctatggaatgaggtgctggtcataccaaatgcaatgaaagtgaaagtcaaagtgtagttacttagtcatgtctgactctttgtgaccccatagactgtagcccaccaggctcctctgtccatggggattctccaggcaagaatattggagtgggtagccattcccttctccagggaatcttcccgacccagggattgaactgtggtttccggcattgcaggcagattctttactgtctgagccaccagggaagcccaaatgcaataatcaaggctaaacagggaaaagtcacgctaaaataatttcaattttagatgctaaacaaaaagaggcccggagcttggtatgactagtacttggtccctgggatgatgaaatggaggagcagtttgtgcagagatgggcaaccctgcagtgatttgcactttctgacactagagccactaattcacctttatgacctgccagcctccattgattttgtcttaattctgtctcctttgtaacataaaccagctttttaaatgttggatttcacctaaattcctggaaatcagtttatttattttcattccccctttagcttggtgtatattttcttccttctgtagatcgataaccttctgcatgtgcttcagggcagaggggcccagcagtgatgacatttgaggtcgcagctccgccccgggaagggacacctgacgtgatccatgagtggaacggatggcagtacttgtcttagtctcccggggcttccataacaaagggtcgtagactgggtggcacacagaagctcattctctcactgttctggaggcctgacagcccagatcaaggtgtcagcagggtgtgcatcttgaggtctctcttcttggcttgctgtgtcctgacacccttctctgtgtccaaatttccttctcttatgaggacaccagtcatgttggatcaaccacaaccccttccctgccccaccacagtgtcttcattttaacttactttttaaaaagaccctatctccaaaaattgccaccaaagtgctagggcttaggacttcagcatatgaatttggtggggattcaattcagctcataaccccatggaattcttttcacgtcctgtttctttgctgggaatatttctagaaactctctggtgttcagtccccttggagagacaaacatttcaagcagagtgcaaggaaaggcaactgaccttctcttctgttctactccagatatttcttccaagctacataagcttacttcttcttccatctttcccttaatttctcaaatgcactaggaaacttcgccggctataactgtggagactgcaggtttggctggaccggccccaaatgcgatcagaagaaaccattggttgtccggcgagatgtccattctttgacccctcaagagagggagcaattcttgggcgccttagacctcgcaaagtacactccgcaccctgactacgtgatcaccacgcaacactggctgggcctcctggggcccaatgggacccaaccacagatcgccaactgcagcatttacgatttctttgtgtggctccattactattccgtcagagatacattattaggtgagctttcccccctttaccttaaggaatactaggcgcgccctaggtggttcagtggtaaggaatctgcctgccaatgcgggagccacaggagactcaggcgttctgaaatcgtgctctatttgtaattatcctcacttttgaggctcctcgttggggttagggtgagtgaagacaaagagctcactttgaatagtaagattctcatttggaatctgtccttgtgtttgggcttccctgatggctcagcagtaaagaatccgcttgtaatgcaggagacttgggttccatccctgggttgggaagatcccctggggagaggatggcaacccactccagtatgcttgcctggagaatttcgtggacaagggagcctggtgggttacagtccatagcgtcacaaagagtcagatgagcacagcacagccctgtgtttactgctcattccccctcctcattttgttttgagaactttaaactttgttctgcattcaaacatttacaaagggctgcctagccaacagcagcgacagcagtttttcccctcagtgtgggtctttttaaaacttgcctcacaggtaagcatctgtctttctgtatcgacagatacagaggctcttctggctataaacctttatagttttcctgtcatcattctgaagaatttttgctttatgagagggtagtctctcaagaggaaaagaaaactatagtttctggtcgcatctaggaattaaatttatattcatgtctgttcatctctctgaagttattatggggactttgaaaaagaactaaagttagctcaagtttctacataaccatcaaaagctgttatgagatggagaagaaggattggaaaggcagtaaggaggtcattaaatcgcccaaagcttttcactaaaattggcagttccagaggccagccaaattggtttgaatgtatttttcctctcttctggtctcggcaaccatgcttgtcagctaatagttgtaactgattgatggctgaggcaaaacccgtgaaagttccttttggttccaaatgctgaattcagactaagtgtagttgaagttgctttgttattcattaatccctccctataaatgcaggcatttgtaaggaataggttagaaaaagtctttaaaaaatatatttcatttagatcttaatgatctgttctttgggatactcttattttatcttcctgaagcactgcttctaaattaaatttataacaggagctcttaagataacctgagtttctccgaatctctgctgaccatcagactttcgagagatgaaggagaatttatcctgaaagtgctatttgcctctgagattgttttgttgtggttgttgttttcagagggataaatgacaaaaacagctgttttcccttatggttgaagaggaaaggtgggtggggagataaattaggaatttggaattaacagacacacactgctgtatgtaaaatattaatagataaacaataagatcctattatatagcccagggaactatattcaatatcttataataaaccacaataagaaagaagaaaaaatatatatgtgcttcccaggcggtgcagtggtaaagaatctgccagtgtaagagacgtaggtgcattccctgagtcaggaagaccccctggagaaggaaatggtaacccactccagtctgcttgcctggagaatcccatggacagaggagcctggcaggctgcagtccatggggtcccaaagagtcagacacgactgaacgtgtgcatgcgtgtgcgcatgtgcacacgtgcacacacacacacacacacattcagcaaactgaatcactttgctttccctgaaatattataaatcagctattgcttcaataaaaattaattaattaaaaaaatccagttgttttccgactaaaatgtcatggacttactggctctccagcacatcccaggtaaggttcacgttaaaaaattctattctgtgacctctaacatgtttcccaattgttttaggaccagggcgcccatacaaggctatagatttctcacaccaaggacctgcctttgttacctggcaccggtaccacttgttatggctggaaagggatctccaggttggtcaaaagtttcttttagttttgctatgtatttgggcaagacccgtctaagtctttgcttccttcattttcttgttgtttctgatgacatgaattgaacgtctgatcatgccctttgcttttagcgccttactggcaacgagtccttcgctttgccctactggaactttgccactggcaggaacgagtgtgatgtgtgcacagaccagctgcttggggcagcaaggcaagacgatccgactctgattagtcagaactcccgattctccagctgggagattgtctgtgataggtaatgacatgggtacctgctgtggaaatccaagagaccatatttcctcatgtctgagagatggacagtcactttacaattctgtttctaatgtgtgttgaattctgtttgcatgtttctgaaagttattttcctgcaggaagtaggattttttaaaaatcctgagtcctttagtaaaaaaaaaaaaatagaagtatggaaatcacacttataaaactgagtatgccccatcgctttgagatccactgttttaaaatgagaagtacttcctatattcagccatgccttgagctccgatcatattctaagcagtttaatagtgctgggaatacatggatgaataaaatacagccttcctttggaatatcattttatacttacaaaggtagatggctggtaaacaaattacagtaaaacgtgagaagttattttaataggtgtgtgtgcaaagccaagaagaaaatcagggaaagtctttagaaggtagagatgattatcctgagacttcaaggaggcacaaacctctcagccacaggtgggggagggtggtgtgtacttggttgggggaacattatgtatgaagctagaaaagcctctagaagctgtctggtatggctggaccatagggttctggggaattgagaacagaaaatggggtaggaagacagatctctaaagtactaaaattgggtcatgtgcagctgctgtaggaacttttttcctaccataagttataccaacaaatgctggttattaaaaaagtacaatactcaaatacacataagcagccagtagctcatgaagaattctgtcctcagtgattccttgaatatgtctctttctgaacacacatctcaggaacagattccccaggcagctcttctgtctctctatgtgttcgtttcctccacaacctgctgtgctcacactcttgccctatgtctttggactgctccatggggtgtgccgtccacaccccaggctgggcatgcgcgggttttcagggatccagctcacagggaccccatcttctccatcctgagcttttcctacagcctttcagacagtgtccctggggatgtagtaagtgctgtgtatgtgactgtgagtcattccagaaggctccatttctcatagtgtcctgggctattagtcggtggtatgtgaaaagagatatttctctgatcagattaatttagagaattctgaacttaaaatgtctttagaagttttagaatgtctcagagcctttaagtaaccatattcttatttttcaagaggggcttaaacttacctgaccctgacacccttaatttcacaggccgtctcactggaatgctctgggaaaggcagcttttagagtctgtttctgcctagtttttaggcaccagcctatttcatcttcctgtgtatgctgattctattctcacacactcagtaagatcccctcatccattaaaatccacacagaaacatctttaaaaattaatctctactgaatgaaatactgctctgatggtggaattccaggccacaacaggcacgtgggatataataataccggcaggggtccccagcctctgggatctaatgcctgatgatatgaggtggagttgatgtagtaataatagaaataaagtacacaaaaatataatgcgcttgaatcattctgaaaccatccccccacccacaccccccaccccagtctgtggaaacattgtcttccccgaaatcggtccctggtgccaaaaaggttgggacccaccttctcagcctccatgtttgccaagtaaccatcccaaccttagagcattttctaacacggcatttctcctaattcctctcctccatatagtatcatctgttttgactctgaccaccttcatttgtcttcagtttgcctggaatgctttcctagcttcacttctcccaaactggcttagtcaaagtctctcagttgtgtctgactctttgcgaccccaaggactatacagaccatggaattctccaggccagaactggagtgggtggcctttcccttctccaggggatctttccaacccagggatcgaacccaggtctctcacattgcaggcagattctttaccagctgagccaccaagaaagcacatgtgtgctggatgattgaatttaccagatcaaactggcttagctcagtgttaatacagtctaccctggttactccagattcaaatgcacgtacgataggagtcaccatctttgcctagtaaaccgtcttactgcctttccaatggaatggtaatttcccttgttacttatatgttgatttatatttcatgcatcgatattttcaaaactccttcatccataattgcttttggaagcagttcttttaccacatatgtttgacccttgtaaggtaactatagtaaagtttaccacaactatgaccttgattggtttgttgggctcaaagttatgatactatccatgaactaacaggtattatttctaacctccttacacattttagcttgaatgactacaaccgccgggtcaccttgtgtaatggaacctatgaaggcttgctgaaaagaaaccaaatgggaagaaacagtgagaaattgccaactttaaaagacatacaaaattgcctgactctcaataagtttgacagtcctccgttcttccagaactctaccctcagcttcaggttggtgctctgatatctatattttaccgtcctttttagatttccgtgcttgtagttataatgaatgggaaggagagctagatgttgggagacatcaaagctcagtaatagggaagcgctttgtaagaggatagatagcaagacatagtgttacctatcattaattgttatttagttgcttagtcgtgtctgactcttttcaactccatgaactgcagcatgccaggcttccctgtctctcattatcatcaagagcttagtttttatatcttctaactcagctattcaaaaccacctttttgcatttctaatttctatacacagataagtacagtcttctgaaccatggtacctcattaattacatagagtatttaaaaaatattttcttgtgttctttcctattctattctgcgttaaggaaatatcagccaaaccttaatgtttggttctgagatcttagaggagtaaaaaatcctcctgccaacccaagagacaagagattcgggtttggtccttgagttggggagatttcctggagaaggaaatggcaacccactccagtattcttgcctggggaatccccgtggacagaggagcttggtcgactatagtccgtggggtcacaaagagttggacacgactgaatgaatgagcacctgcacacagactaaatgctactcagattacagcacagtaacaacattaggatacttgaaatttaaaggccaactaataattttctccctctaaaaagattgtaagaattatgagaaataattatgtaagaacaaataaataattatgtaagaattaagagaaatggctatgggcttcccttatagctcagttgataaagaatctgccttcaaggcaggagaccagggtttgattcctgggttgggaagataccctggagacagaaatggcaacctactccagtattctcgcctggagaatcccatggaggaaggagcctggcaggttacagtctatggggtcgcaaaagtcggacctgacttagtgactaaaccactatgtgtggctgtaagtaagatttaaaaaaaaaatttgtttattgtttatttggttgcactgggtcttagtttcggcatgtgggatctagctccatgatcaggaatcgaacccaggcccccctgcattgggagcatgaagtcttagccactggagcatcaggaaagtccctataaataagattttaacaagcatcttagaagatccagaaaggaatggcagatagattcatggttttcatgactaaaccttacagtaactgttcaactctgagccccttgtgttgctcagttgtgtccaactctttgtgacccgatggactgtagcccaccaggctcctctgtctatggaattttctaggcaactaatactggagtgggttgccatttccttctccaggggatcttcctgacccagaaatcgaacccaggtctcaatgtctcctgcatagctcctatttcctgacacaatctgaaattagcagactattacctaggctggaaacaaaaagggagctttctttgtcagttcatgactctagttgctgaaatactgatttctctcaggaatgccctggaaggatttggcaaagcagatgggaccctggactctcaagtgatgagtcttcataacctggttcattccttcctgaatgggacaagtgctttgccacattctgctgccaatgatcctgtttttgtggtatgttcaaagactcagagcagataaaaaatgtcctagataatgtgttgaacttatttgcttttcaacaagattaaggtttggtgtctgttttattctctgtgtgaacaacgggatgtatgcataagtcaattaattttaatctacaccatacgggtgggtagatagtgcttgaagtcccctcagccgtgctttagagatggttggttagctttgggatgaccctggatgggaatttacagtccagaagtggattcataaattagcataataaggttattcatgcatgcgtgctaagtcgctttagtcgtatccaactctttgcaacccagtggactgtagcctgctgggcgcctctgtccatgggattctccaggcaagaatactggagtggtttgccatgccctcctccaggggattttcccaatccagagatcaaacccacatctcttgcatctcctgcattgacaggttggttctttaccactagtgccacctgagaaaccctaataaggttacaaattatatcataacttaacatgagcatgaagagaaaggatttttcattggtagaatgagcagtgttgaaggtaagtgatggactagaaagtgaaagtgaagtcactcagttgtgtccaactctttccgaccccatggacagtagcctgcaccaggctcctctgtccatgggattttctaggcaagagtactggagtggattgccatttccttctccagggaatcttcccaacccaggaatagaacccaggtctccctcattgtagacagatgctttaccatctgagccacccaggtctcagcgaccgaacccaggttttccaccttgcagatggactagaaggactgtacatatgccatgaccctggcatgatgcccacctacctgaggcccaaaattctgtttagtgtttggtcctggcccccttcccttcacaaaggactggctaaaaatgagctgctgttcttgccatcggaggatcagaaatgtggactattggtccccacttctaataagttgaggggttatctgtaaatcttccattgtcatctttgctcttctgtaagatgtctgccttgttcactggttctaatttgatatctcacatcactttcagcctatcatttcagccattagctatgccaaatattttcttgtctacctattttgctatctagctatttatcaatactatatatctctaaatttttagtaaaacatacatttttaatttgtacataacaacccttattgataaggaaaaatgttacagtactctttatacagtactccaaaatattctgagaatagcagtcctctgacaaattgaagattaaacccaaacctttcactcctaccaaaggtaatagtggggatggctagtaatttgattttcggtcctaagtttcaaggattgccaaatcttatctccttatttcgaggaaacccactaagtgggtttctctggcgactcagtcagtaaaaaatccatctgcaatgcaggagacatgggttcgatccctggatcaggaagatcccctggggaggaaatgacaaccaattccaatattcttacctggagaatcccatggacagaggagcctggtgggccacagtcccgcctcagtggggtctcagagagtgggacatgactcagcagcagtattttgactaaatctgcagggcttgacaacatttttctgtcaatgaccagatagcacatgttttaggctttgcagacaagatggtctctgttgtaggtgtgcagccttgccgctgtagcgtgaaaggagccgtagacaatacatgaacagtgagtgtgttacccaaatctggggtcatctcttggtgggtgtttagccagaaaacacagccaagtcaaagatcaatcaggagaaggaagtaacttgcagcaagtaaggagaacatttggggtctttcccaaagcagcatctcctggaggaatagcaaaattggggaagttttaagctaagggtacatgaatattcatgaaggggcttgtgcataggagaattcagcatgaaatgaagtgaagtgaaagtctctcagtcaagtctgactctttgtgaccccatggactatacaggccagaatactggaatgggtagcctttcccttccccaggggatcttcccaaccaacctaggaatcaaacccaggtctcctgcattgcaggcagattctttagcagttgaaccaccagggatgcagcatagaattggagcaaaggtcgacagagtccaagctttagttggacttagctttcagttcagttcagtcgctcagtcgtgtccgactctttgcgaccccatgaatcgcagcacaccaggcctccctgtccatcaccatctcccagagttcactcaggttcacgtctatcgagtcagtgatgccatccagccatctcatcctcggtcgtccccttctcctcctacccccaatccctcccagcatcagagtcttttccaatgagtcaactcttcacgtgaggtggccaaagtactggagtttcagctttagcatcattccttccaaagaaatcccagggctgatctccttccgaatggactgattggatctccttgcagtccaagggactctcaagagtcttctccaacaccacagttgaaaagcatcaattctttggcgctcagccttcttcacagtccaactctcacatccatacatgaccactggaaaaaccatagccttgactagacggacctgagttggcaaagtaatgtctctgcttttcaatatgctatctaggttggtcataacttttcttccaaggagtaagcatcttttaatttcatggctgcagtcaccatctgcagtgattttggagcccaaaaaaataaagtctgacactgtttccactgtttcctcatctatttgccatgaagtgatgggaccagatgccatgatcttcgttttttgaatgttgagcttcaagccaactttttcactctccactttcactttcatcaagaggcttttaagttcctcttcactttctgccataacggtggtgtcatctgcatatctgaggttattgatatttctcccggcaatcttgattccggcttgtgtttcttccagcccagcgtttctcatgatgtactctgcatataagttaaataagcagggtgacaatatacagccttgacgtactccttttcctatttggaaccagtctgttgttccatgtccagttctaactgttgcttcctgacctgcatacagatttctcaagaggcaggttaggtggtctggtattcccatctctttcagaattttccacagttgattgtgatccacagagtcgaaggctttggcatagtcaataaagcagaaatagatgtttttctggaactttcttgctttttctgtgatccagtggatgttggcaatttgatctctggttcctctgccttttctaaaaccagcttgaacatcagggagttcacagttcacgtattgctgaagcctggcttggagaattttgaacattactttactagcgtgtgagatgagtgcaattgtgcggtagtttgagcattctctggcattgcctttctttgggattggaatgaaaacggaccttttccagtcctgtggccactgctgagttttccaaattttctggcatattgagtgcagcactttcacaacatcatctttcaggatttgaaacagctctactggaatgccatcacctccactagctttgctcgtggtgatgctttctaaggctcacttgacttcacattccaggatgtctggctctagatgagtgatcacaccattgtgattatctgggtcgtgaagatcttttttgtacagttcttctgtgtattcttgccacctcttcttaatgttttctgcttctgttaggtccatatcatttctgttctttattgagcccatctttgcatgaaatgttcccttggtatctctaattttcttgaagagctctctagtctttcccattctgttcttttcctctctctttgcactgatcgctgaagaaggctttcttatctcttcttgctattgtttggaactctgcattcagatgcttatatctttccttctgtcctttgcttttcacctctcttcttttcacagctatttgtaaggcctccccagacagccattttgcttttgtgcatttcttttccatggggatggtcttgatccctgtctcctgtacaatgtcacgaacctcattccatagttcatcaggcactctatctatcagatctaggcccagcttaagttacaagtgacaaaaggttaacatcatcatctcctgggctccactcatctagtggttgagggctttcagaagaggggttagattcttcagaacagctcaagaaagtgcttcaggctaatctttaatattaaaacagaatggagagtctttacaactgatttgttacctttgctattgttacttctcttgtctgttaacagtcaatttgtttttttgttcatttaaaatcctcattactgaggcttcttcaagggcaaacactgtggccaggcctagatggcaaaatggtgtaggcttaaaatggtcttttttatgtcaaaaagctgtatttggttctttcctttcagaccatccatttcctatctgcctacaagtgtggtgttctaataaaactttatttacaagaatagtgagccctgtttacccagcaggctttagtttgtcaaatgcagctggaagggatcagtgtcttctgtgtagtacagatatctctttagtcatctttctcttactgttctagctggaagcccacattatgattttatagacgtgggattctgtgacttacattaattcaaagacacaggatgttttatcatccttgtcttcattacttttaatacttttaatatataaaattttgttttccttggtataagttatgtacatataaatagacaaaaagccacagcctttctttgaaggcacagaaggagtaatgttttggcaccagttccagaactcacaattactttaggctattgacaaagagtttcatgttgaagccaattcagcttcaacaatattgagagccaggggaaagcacttaagtttacagagttatggcttatggaatttcaaatttatgcaaacatattgcatatgacattattaaatttgttttttgtgaaatttcttcaagcaagagaaacacacatttgtatttgatcaaaatgaatataagaaggtgtgatgttaaaatgcaggaaatactctgaaccaatctctgaaattctaattttaaggtaattgaaagtaatgcacacatttatcatggaaagtaagattaggtcacaggaatgctaaatagttctgttttcaatatcaaatttgggtataacctagaaaagaaaaaaaggagggaaaccaatagactgtaaagttaaatagttaactgccatgaaagaaactatgttagaggattagtgactttgtgcccaattcctaaagaaaatattcttaacaatgtatttggatgttatcctcttagaaaatgtagattcggcaagttttaattcttggtggggagattaataggttgcacagttaatatttactgaatggctcatgtgtctgttcttcaccttttacattaaaattctaaatggaattaagacatactggcagccttgttaccatttatatttatttctttttttattgatctatagttgatttatttacatatattattgtgtatactatgggcttccttgtggctcagctggtaaagagtctgcctgcaatgcgggagacctgcgttcagtctctgggctgggaagatcccctggagaagggaaaggctgcccacttcagtattcttgcctggaaaattccatggactgtatagtcctcggggttgcaaagagtcagacatgactgagcgactttcattttcactttgtgtatattatatatataactgaatcactttacacctgaaacgaatacagtatgtgtgtataagtatatatatatatattctttttaagattttttccaatataggttattagattattacaagatgttgaaaatagttccctatgctatacagtaaatccttactatttatttatatttcttaataatgacaatcatttggataagaaagaaatttaagaatataaagcaagaaaagagaaaatgagtttttgttgttgttgttgtattttggccatgccgtgcatcttgtgggatcttagttccctagccagagatccgactcgtgccccctacagtggaatttcagagtcctccccactggaccaccagggaattcccaaaaatgactttctaaaaacgaagctctaatggactacaccaagttaaacctgtaaggccttatctgactctattttcctaaactgcaataaaattaataggtcacaatagcaagtataaaatatttctgaattattatgagtaagttgaaatttttaaaaagagtatatagggcctttcttttctcccctcaggagcacttaaaaatgggtctgctttatttatgttttttaaaaagaaaagttgtaattagacaaataccttgagaatttaaaataatgttgttttatgtcaatttaaaattttttaactgtttaatgatttttaacaatttataattgcagatatattggcaaaaatatttaaagtgtctataattacatttcaatattcttgcttatttcctttcatagtcttatatgttttacagtagccaatatagtgcacatattttcagaatgttatatagtttcctaaattttttaatttaaaaaacttataacatataatgcacataagaggttaaaatgaaaaaggcataaaatgaagtccctttatcaataccagctcccagctatccattctcatttttctttattcttccagatataatttataaatatacaagcacattatatatttctttatatatttcattatccaaatgaaagcatactatagacacttctgtgacttgtactctttatttgttttacttattttaaacacttttcttttaaaaggctgcatagtactctgtgggctttccaagcagctcagtgataaagaattcacctgtaatgcaggggacacgggttccatccttaggctgggaagatcccctggtggaggaaaaggcaacccattctagtattcttgccaagaaaattccacggccagtggagcctggcaaactacaggccataggtttacaaataacttgggcacgactgagcacacacgtatggtattctttagtgtgaattcactgccgaattggtctcctactgatggatgcttaggtggtgtctcatcttttggtttatgaacaatacagcaataaatgaacatataggataaatgagaggatagaatcactggctgaaaagttaaataaatgtgtttgaaatttggtagatattgccaaattgccctgtggaaagttgaaagatttttttcctctacccagctatgtagcagagggacagctcctccactctctctcattagtctggtatattatcacactttttcctttttgctaattgataggtgaaaatatttcagtgagtttaattttcatttcttttcttctaaatgaagttcagcatcttttcacatatttaaggaaccttttgcattttcttttctgtggtctgtctgttcacataggataatgagttctgggaagaaaaaaaaaatgaaaagttcttaagagaattcggacttccctggtggctcagctggtaaagaatccacctgtaatgcaggagacctgggttctgtccctgagttggaaggatctcctggagaagggaacagctacccactgcagtattatggcctggagaatttcatggacagaggagcctgacaggctgcagtccatgggttgcaaagagtcacacaacggagcgactcactttcaagagaattagtgaaatgctttgttctctgtgtagcgaagtgaaagtggctcagtcgtgtctaactctttgcgaacccatggactatacagtccatggaattctccaggccagaatactggagcgggtagcctttccctttcccaggggatcttcccaacccagggatcaaacccagatctcttgcattgcaggtggtttctttacaagttgagccacaaagaaagccaaagaatactggagtgggtagcctatcccttcttcagaggctcttcctggcccaggaattgaaccagggtctcctgccttgcaggcggattctttaccaactcatctatgaaggaagcccccaacgttagcaacaaataaaacatcctctttaaatattttacttttcttggaaacctaatgctctgttcatataaaaatgtgttcttaggggacttccctggcagtccagtggttatgacttagccttccaatgcagggggtgtgggttccatccctgttggggagctaagatctcacatgcctcaggcccaaaaatccagaacataaaacagaatattgtaagaaactcaatgaagatttaaaaaatggtccacataaaaagaatgttaaaattttactgtgttttctagggttcactagcttaagagaagctcacattataaataataccacatcccacctctgcatcagtgcttaggtatataggttagttagtggttagtactcggttgatgtgcagtaaactcttgtgaagagaatgtgagattattgagcacttattactgtgtcactagataccatgtaaacataatcttttaacttcacaaaactgtgtgtggtaaatatggggacaataaagttcagagaggctaaggggagtacaacagcttatgtaagtggctgagcagagattataagaaaagttttctactcaaaaatttccccacgttgaatattccagctgcaattttgcctgtagacagttcttcatttgataccttcacaactgctttcatgaccactgaggacattttgtcctgttcgatcatgttgatgggaattaacactaattggtgaagaggcaggtctagattttgcttgacttttgaaaagatggggcattggttttatcacgagtaaggattcatgtttttaaaatgtcacatttattttattgaatctatgtgtttttaaatacctgaaatagacagctactaattcctaccatcttggtgaattttgcaagagctgaggtaccagcaagggtggctggccaccttcttggggcaggatcttccaggacgtcagggtttccataggctcagttctgggcagggggtgattttatttttcttaacagttgaaaagctataataatatttaattaagtacaagaaatactcttgactgaagtgtatatcacatattctatcatgaaatactcttatttattttctttattgaagtatacttgatgtacaatattgtatgttacaagtatacaatttagtgatgcctaattaaatttttaaaaattatacataagtgggtttctttttaatatcattttactttattttaattattatttatttatttttggaggctgcgccatgtggcatgtaggatcttagttccctgaccagggatcaaacctgtgccccctccactggaagctcagagttgtaaccaatataccatgaaggaagccctgattcacaaattttaaggattatactccacttactgctactactaagtcacttcagtcatgtctgactctatgcaaccccacagacggcagcccaccaggctcccccatccctgggatactccacttagagttattttaaaacattagctatagtccctgtgttttacagtatatccttgtagcttattttataaataatagtttgtagggatgttttgatctttaacttacacatgctaaatggttaaatggagatgaaagggttcttttcaattctaaattttataaggataaacatactctttggagaagaattaaacttaagagatgaactgtatacacttcattattgatgaattatggagaaggaaatggcaacccactccagtattcttgcctggagaatcccatggatggaggaggatggtgggctatagtccatggggttgcaaagagttggacatgactgagcaactcagcattaagttactcagaattaagtaatataatggcaaaccataatatatgtacatatctaagatggttctagcattgattggagttcctctctcttagagctttggaggctccttagcctcgaatggcctgggagtatctcagttcctatctagaatctcttctaacatcaccctggtcctctcttttcaatctatattgtttgcctatgatgtatgctgaactggtcacatcttttaaagctgacatattaacagcagaactctcctgtagtcctctgtttgcatctgttcaaaatttaatgcttaaactacaagctttctttctcagggatattgcagctgaattcctaatgctcttgctatttcttttatatgcatattattgtatcttgtatacaatgtatatagtataattatatgtttacatatgtgtattttgtatacaatgctatcatacaaagctatgaagaaagggtgctttccttaggtaactcttccaaaatgcctgaaaaaatggaagaatggaatggttctattctgtctgctcaggatgcaatgagagagtgggtagaaaaggagaggggaaaaaaaattatagtaaaatgagaaataccatctgggcttagcactgcccaggagactctattgttattcaaatgcccattttctctggtggtttttgtctctcactaaatgtgctgcctatggagtactcatctccctgtgggagagcttgctgctgctgctgctgctgctgctgctaagtcgcttcagtcatgtccaactctgtgcgaccccatggacggcagcccaccaggctcccccgtccctgggattctccaggcaagaacactggagtgggttgccatgtccttctccaatgcatgaaagtgaagagtgaaagtgaagtcgctcagttgtgtctgactcttagcgaccccatggactgcagcctatcaggctcctccacccatgggattttccaggcaagaatactggagtgggtcgccattgccttctccggtgggagagcttagtagtcagctaagtagaagttgggtgtcatgtaactattttaagcctattacctatggcttctttaggtatataaaaccaacatcttggctatacattgcttcaaatccttgataggagaaggcaagaataaataaatattccacggcaatctttctgtaggcacaaatactcttcttgtgtcagagattctgtgtggcaggaatctgaattttcagtcccctaagtgaagattggcttcctaagtggctcagtggtaaagaatctgcctgccaatacaggagacacgagttcgatccctgagttggcaagatctcctggagaaggaaatggcaatctccagtattcttgcctggggaatcccacagacagagggggctgatagggtaaaatctatggagtcgcaaaacagttggacacaacttagcaactaaatgacaacaatgacaagagaaggttgttagtaacttcatcctccagtgatcttgagaaagatatgcatgttttccctgtactttatgaagtttctttatgccgctaagcacaatatttgttgatcaattgctttcttctgcaaggttgcattaaaaaatttttaccttgaaagcccatgtaatcacattttctccaatactgccttgcaagttgaaatttagcattttttctcccttcctatacctatctttactttgttggaataagataggctaagtttgtgtaccaaaatttgtaacctcatttctgaggcactcaattattaatgctaaaatataagtataaatctctacagcagatataaggcaacagcagtttacttttactttgcttttgcttttatttatggccttgaattacatttacagagatagtagcttattttcaacctgtgttcaacaaagatggggcttccctgttggctcagatggtaaagaatccacctgcagtatagaagacctgggttcgatccctgagttggaaagattccctagagaagggaatgactgggaaattccatggacagaggaccctggcggtctgtagccctttgggtcacaagagtcggagatgactgagtgactaacactttttcaacaaaaataccactggtttatcaaaagcaattcaggttatttcatttaggaacaatgttcacaactttatcaaaaatacctagtctccctgttgccctgcttctccttctagcctctggttacattgttgctcacagcattttgtctcttgcctattttgcatctccttggctggcgtgctgccattcatggggttgcaaagagtcggacatgactgagtgactgaactgaactggcatatgctggtcctccaccccctcatccttttttttgaactacattctataaattggttcatctgtatgtagctcctattagggtttttattggataatgtttaaccgctcatctgagacctataatcttctcattactcttcccctgttctttccctccaaattatgaatttctttagagtctcatcccctccctaattgtttacccttccacacctggtgaattctggtgcttccacccagttatttgcctcttacagcactgactctacatctttctctgccctgagattctcttatctcttttttttaaaaaaatcgcagtttgatctctgacttcaactcaggtgggttctaaaagttcaagagatactgtgcggcctttcttacaaagtacattctgatacacacctttttctgtgtatcagttagcacttggttcaactgcttaaaatagaaaaccaaaattacagaagttggacacgactgagctacttcactttcacttttcactttcatgcattggagaaggaaatggtaacccaatccagtgttcttgcctggagaatcccagggatggcggagcctggtgggctgccatctgtggggttgcacagagtcagacacgactgaagcgacttagcagcagcaagcaacaaataaagaggtttatttttctcattgtgtaaaagaactccagtggcaggtggttcagctttggtatagtatctccatagccatcataaactccttctgtctttctgcttaaccatccttggtgagtggcttcttttcttagctttgcttgcgggctgctaagatagctgccacagcttcagccatcacacccatgttccaggaagcagtgcgaaggaatggagagggaaaaggggccccctttaagctgagaaaaccatctttaacaagattttctagaagtcctatccagtgatttccagctaaatctcatggataacttggcacattgcttcaccataaacaccaaagaaattaccgagaaagaagaggagaaaaaggctattgggtaagcaatagatagtgcttgctattcttggacattgcgcatctatttcctgggctccacacttgaggcagaacttctgtttgaggctgtcaggttcccgaggtcagacctggagcatggagctctctctgggaaacttctaaccttatctagagctcccaggattttacagcacgtgatattgttttcagggacctacaccaacagctaacgctcagctacttttccagggttaatgccccttctcaaagaggaacttctcctgaactctacttgggagagacatgatcactcgaattatcatgtgttccttcaaagctgttgctcattcgataagcttgatgccttttattccctcggggcttaaattctgtgcctcaaagccaagatttcagaagtcaaaaaatattttctgtctgtgaaagcccaggtcttacaatttgatgttttggtttttaacatgtatcttgtactgaccaaaaaatacactcacaacctaaaagtagagagtttttttatttcgtgggaatgtttaggactctgagtccgggagacagtatctcagcagctctgagaaaaaacgctccaagaaggcaggagggaagtcctgctatacacaagtttgcaacaaagggaacaggcagtcttaacatcaaagttcaggtatcaagttaaggaatttagcattctgtgtatgggaaggtgtaagcctctgggctcactgaattcattcctttcatatgcacctcagctatctggggccaatcttgtttccttattcctattgctttctgcattctcccagctcctcagcaatcaccacgggggtggtgtgtggcagcagtttcaggagccctcatgcccattcggaggccagaaatcgctgatggttgtgacatgtcttgtttattaatatggcaggagataatttcatttcatactttccatgaaccttaaaaatccattcagaaaaaaaatcctttcagtaaaatcacttgattcttttcactatcgtgagagtacacacgtgagacaattcaagtagaaagctctcgctgttgcctgaatgggtgagctagctacaaggaacctcgggtgaaatctgaaactattatctactaaataagcagcagtaataaaaaccagaaagtgaaattgttaattgctcagtcatggctgattctgtgcgagcccatggactgtagcacaccaggcttccctctcctttactctcccctggagtttgctcaaactcgtgtccattgagtcaatgataccatccaaccatctgaccctctgtcaccctcttctcctcctgccctcaatcttttccagcttcagggtcttttccagtgagtcggctcttcacaccagctggccgaaggattggagctttagcttcagcatcagtcgtttcagtgaatattcagggatggtttccttaagattgattggtttgatctcttgttgtccaagagactctcaaaagacttctccagcaccatcgtttgaaagcattagttcttcaatgatcagacttctttatggcaagaatattggagtgggttgccatgccctgctccaggggatcttcccgacccaggcattgaacccgggtttcctgcgttgcagatggatttgttgccatctgactcactagggaagcccttggatgagttgtacaaaatataaaagtactttgcatggcactgtcatcagccaacagaaacttattaaacatcggttctgtccaagttatagactaagcctaaaactccaaaggtgaaaagaccttatctctgacttttaggagttaggagtctcattatggaaaattgataaacaaataagtgatagtataacttcaccagtgctatattagtggacggataaatgaattcatttaacctgtatttactgaagtaagtatctcctttcccccatgtgacaagccctggggtgacagaccctgcagacaaagagggaaggaaaatcatacagagtccctgggctccctgaactactaggaatgaaagaggacctctaacggcctggtcatgtttgtgtcctatcgcaaaatcagcactataaatgtgaaattttgctgttaaatattttagatcacgtaataattgctgtctttgaaaaggactttgacagctttcttgagaaaataaaacagcactatgcgcattacagagtttttagactttcttttgctggcctgacactgagaattcaaatgaaaggcttatacagtgagcacatagaagggtgggagaaatctgaagacccgttttggatgttttctttctctctctctttttttttaaaattatccatttgtattataccattgtatactattggtaaacacaatatctcctttcttccttgttaaaagcaaagcatctgaatattggctgtagtatatatctcatcatacttgcctttttttcctgaatgtaataattaacttgaatttgttgaaggcctcaaatattcttaaaccagtgctacatctgccacatgaaccttactttgttcacttaacaaaggggtgtatggagtgatatgccatccagccttgaaagtgaaaagcaaagtgttagccctgagtcatgtccgactttgcccccatggactgtagtctgccaggctcctctgtccatggaattttcaggcaagaatactggagtgggttgtcattcccttctccaggaaatcttgccagtgggtatgtcaccaagaagttcctgatgtcaagaaaaaccaacttcatttcattttagagaaagttccagttggattggtctgattagaatagacccatcaatgttggccgcgcttccccagtgactcagtagtaaaaaatacgtctgctatggcaggagacactggctctattcctgggtcaggaagatcccctggagaaggaagtggcaacccactccagtattcttgcctgggaaatcccatggacagaggagcctggcaggctacagtgcctggggtcacaaaagagtcagacacgacttagtgactgaacacacatccgtcggtgttaacgctgcgttcaactgtcttgcaggtccttcattccttcaccgatgccatttttgacgagtggatgaaaagattcaatccccctgtggatgcctggcctcaggagctggcacccattggtcacaatcggatgtataacatggttcctttcttccctccagtgactaatgaggaactctttttaaccgcagaccaacttggctacagttatgccattgatctgccaggtaactaatgcaacttttaaacgcgtgattcattaatcttctaaagaggctttcttttcttttttcctttctttttcttctaaatcaagaccttaaacggaagtgctcagatctagttaagtttactggcaattttttagagtatgtatagttacaaaatgagcctttaaactaccaattaaacatcagaaaagggactgttggatgactttcgttttagcaaattgaaagttgttaagagaacttatttcagggcaagtatctacaactgcacctgatctgacaattgaaaaccagccatggtttgaaatgcctaaccaataaaatcaaaatgcactagccacggatggatggggacaaccaggacctcttagagatcttaacttaaaggcaaggctgggtttaaggtgaagcaaatgcagcacttgcctcaggcacaaagttcaaagggaagcccaaaattcagtaactgagctaagtaataatataatgcaatattataaaaaacccaatttaatgcccccccccatgttgaatacagtatcaaaattttaaagccaggctgttgtttgttttatacctctgtgttagtttataagtaggccatttattttttttcccagttaacccacaccacccctgcctggtgggtttgtaaagatgacaatggcctgccagtagattgggctgtgtgggacttcatgggtacacttttctaaatgaattttttgaaatcatgtttttagtctttaaaaaaattttttttacttatttatttttggctgtgctgggtctttgtcgctttgcgaaagctttctctagttggagtgagtgatgaccactcttggatgtggtgttcaggcttctcactgcaggcttctcttgttgtggagcacagtctctcggtacgtgagcttcagcagttgtagcactctggctcaggagatatggcatgctgcgtccagagtacgggctcagtaatcgtggtgcacaggcgtcgttgcacaggcatgtggaatcttcctggaccaggtatcaagcccatgtcccctgcattagcaggtggattcctaatcactgtaccaccagggaaatcctgaagtcatgtttttaagttgtagattttttattagcttttccacttggttcaaaatacagaaagatattttgataaatgtaagggcatacttttttttttaatttgcccaggccccagtatagctccatgtgccatttaaagaaccttcggacaggttgataaaggaaaggtaaaacagtttttttaaaaaatctcttaatttgttaagaagctgaaaaacacacagcctatgtgctggtggcattttcccattaatggctattttgtcttctctaaatctcagcctgcaaagtaatcaagaccatttctgaggtcacatctctctctctccccccttgtcttactccctccctgcccccttctctctcaactttcaaaacctttcagaccctgggctctgtcccctgtttttccttccagttctacatctactgcagcttattctctttactgatttgaagtttctcttctttgggcagctgaggtgagaatgtctctttgaaacttttctcatttctctgggattgaacataataataatcagaaagtttggcatgtgcttctgaccatgcttccatggcctctgacatcagtcaattaacagatataacccgagagtctaaatatgcccagaatccattaactcattagaagatacaaatcacattcttttattggttggacaaaaatttacatcctttctgaggagacataactataacctaaggttgaagaagggagagagggatttgggaaaggagctgggtcctgaactgggttaaagagatggagggacttccctgggtgtccagtggttgagtccacgcttccaatgcaggggactcaggttcaatctctggacggggatctaagatcccacatgttgtgccatgtggtcaaaaaaagaaaaaagtttttttaaaaagagatggtaggttttaggtaggttgggggaaagaaaggggcattttagattgaagacaggcaggtaccaggactgtgaaaggcacatgtagtccatatagaggaccgtgagaagaaagcctggtgaggtgaaaggcttgagtaattaactgtgcattaaggttggatctgagagaaggcctggttatcagggactgtaaaagttgggcagaaaccacaataagatcccactttatacccattaggatggctgctaccaagaaagcagaaaataacaagtgctgatgggaatgtagagaaaatggaatcctcatgcattgctggtgggaatgttagcataggctctgtgaaaaacaatatggtagctcctcaaaaaattaaacacagaattaccatgagatctaacaattctgcttctgggcatagaccccaaagaattataagcaagtactcctacagatatttgtacccctctattcatagcagcattattcacaacaggcaaaaggtgggagcaataggagggagatataggagggaagggacatatgtgtgcctatggcttactgatattgatgtgtggcagaagtcaacacatgattgcaaagcagttatcttccaattaaaaataaattattttttaaaaaggtgggggcaacccaagtacccactgacagataagcaaaatgacaacagataaaatatggtccatacatacaatggaatattattcagccttaaaaagaaaggaagtcctgacacatgctgtaacatgggtgaatcttgaagacatgctaagttaaataaaccagccacaaaaggataaaacctatatgattccactatatggggcacctatagtagtcagattcatagagacagaaagagtggttgcttgttgctagagagtgggaatggatggaggactagagaattattatttcaattttgcagggaaaaaagttctatggatgaatagtggtgatgaatgtataacaatgtgaatgtatttaatgtcacagaacttaaaaatggttaaggtgataaaatatatgtcatatatgttttcccacaattaaaaaaaaataagtaattaaaaaaaaaagctaggcagaagagtttggacaataacaaaaggcaatcatttttggctcctgaacaaagaaatgacagaataaaaacctgtattttaagaagatgaggatggcaattgttgcaggaaaagacaaattaaaatccttttagagaaaccccatcaggatgagtcagggtcctctgtgggactggagagaaaggactagaaggacagtcttacatttagagaagtgtagagtacagaacaagaacccacttcagaaaaactgattttaagaactgagcaaggataatttttaaggaaacgacaaataggcataaatacaaaggaaatgaagaaaagaaaaaaaagaaagaaatgaaatccattaattttttggaaaagtgcttataaaagatattcgaatagaggattgcgtttatcatgtaatgaccccgattttattcacaactatttaaatgggtccaaatttcttctgctcttgctcttgaatgacccctgttataatctccagtctcatctgtcttactcactgatcactccataaaaaatgtagagacaacagcaggatttctagacctggctgttgtatattttgttctccagataccattttaacatgcacttttacaaatgagtttctaactcacaaaagtcgttatatacttccttggagggtttattctgtataagtatttattgtaaggaattttgaaaatacaataagctatattcaaacaacggaatgtcattttccacttccaccaaaaaaagttatggatatgataaatagttcataaggaagaagaaaaaattttattccagtcagtatagttttgctttatcaacaaaagcacacatgaaagacacattggtttattcttcccttttctaagagtattcagccgatgaaaagaccaattgtaagactcttctgctttaatttcagttgaagaaactccagactggaccacagtgctctcagtggttacggggatgctcgtggttttggttgtcctttttgcattgatgcttttccttcaatatagaagacttcgaaaagggtatacacccttaacggagacacagctaagcaacaaaagatacaccgaagaggcctagatgctcatgcctcgctctagagaagaggctgaccaagctgtagttctgaccgacaatctgcagatgaaccctcactgatcttcctttcgttgaagagcttcggcatagcccctcctgttatggcgatgatcccaagtacgaaagatgcttcactctaatttctggtttgcttgtttacttaacaagctaaagtgcttgagggtatctctaccatcaaacaaggtagagctgatgacaactggtggtatctgataataattccccatactgattgattaagcctcctcgtgttctgaccccccccaaatcaatagagtggactcactgaaatatgcagatcagtgtaatttgagaactggatcagatcatggttacatctttcttaactcacgtgtcttcctttgtaaagggcggcaggaaggtggcaggtgctacatgagtctccagggtctcttttaggcgtaaacatctatgcttttaggtggattcctgatcatctt

SEQ ID NO: 160 - DNA, 58591 bp, Hippotragus leucophaeus
  source 1..58591: mol_type = genomic DNA
tcggggatggtgatgggggttggtggtcacaaagtgtgggaagggtaacgcggggctggcgaggggaacgctagggctgagtcatgaggcgatggggggaaccccagaggaggaatggtgatggcccaggacccagtggccccaagagcccgagtcaaggcaggatgaagcagggtagcccctaggctcttcctccctcagcctggctccccgaagcccccggaccaggtcagagttcacaccagcagctccgagactccagaagcgttcggtctctccgaatccgccgccaccatagagacgacgcacggacgcacggccgttgggtggggtgaactaccctaacgtgcgacgcgcgcccggcgcggctgccggggcaactgtgggcggggcgagcctccctgcggcgcggttgccgaggagaccgataggctgcagcagcagctgcggctggacaggaaagctgctggagcctgggggttgaagctacagttgaggcgatggcgcacgaaggcccggtgagctttagctcagctgagggtggcccagagcggggttaagaccagtgtccggaacccgtgggccagctctgtgccacccggcatccgcccttcacgcgggcgttcaagatgaccgaagaagccctgtcggtgcaccaggacagaaaacctgcacctgcaccacgcgcactcacaagcatggtcacacttggagcctgagggaagggggttaaatgggtgatgaagagcccaagaacaagaagtgactttgacagcagttaatgcgtttaatgagtctcttatattgaggtactcatttaaatggataaaccagaattggtcaggcactggataggattcatttggacaatttcaggaagaagaaatggattaaacaattctgaggctgcacttaaagtcaattgtttaaaagccaagaaactctaaaatactgaagagcatttatgcagtaatgtctccaacccctctggtcaggccatttctaggtgtagccagccattagcgcgggtgtaatgagagcctgggcggggttgactaaggaatcaactctcctcttccagccgtacctacccgtgctctggccaagcctgaacggggctgtggaccattccttgggcttgccaacagaactgttctcactagcagagatgggaaacgaaacttaagggattttgagttcagtgtgaggtttaggaaacaccagagttgggggagaatgaattttggggaacaccatgtatgaagcaataatgtttggggtggggagacaaaagttagggaaattgtgttgggaaggaatcagcttgagggaaactgtcgtggggaaattaagaggctcccaataatttactagtaaatttgtatgtccttaaaatgggtttttgagagactagacttttcttttttagtggatttttcttgattataaaaggatataaagtaattgtagagaacttataaactggagaagagtgtaggaaagaaacatattttcatttcagagtatgcctttgtgtatttataaaactggaattggtacttttgaagattggacatcttttcagatgtttattagtcatcaatagttccacttttgtgaaatattatgttctttgcttattccttggagatcttatggttataaaattttatatgcatttttaatgtatttgggaatatcttttttaaaaatttgttgcatgtattttttgtttaggaagcaggataaagccgagctctggagtcaaacagacctgcatatgaattatgactctacgacttccttactctgtgatcttgggcaaattctgtgaaatggggatacaaatagtatgtagtctaaaaaatgtaggaactgaatccatgtatgactgatatactttaagtgccagtaaatgataactaggaattatcagcttgtaattaggaattttaaaaaaagcacaggaaaatttgacatatatatatacagttacctacccatttctgtattattttttacattacttttatgcttaggcagctgtttgtcacccagagattatatgacaatttaaactatttcccctacattttatcttttgttttaattttgttttgtttgtgtgcatgcttgaattcatctggaatttatttagatgtatattgtgaaatgaggatctaagttgatttggggagtgggaggagatgggaaacacaccaataattcctgtactgtttattgactttttcaaattcctgaactctgaagaattttgaatactttgaactagcgcaaatagtaaggactgtgcagttagagctatatataaatatagcctgggttcactgtgtaatcccaagcaagtggaggtgaactgctgtcaggcttcagttcctttgtctgtgaaagagactgagtgagctgtttgaaaaattaaatcgtctaggtcacctgaaaagcatctgtcacatagtggctcttagcagtaaagtgtctctttctaaaggcctttccttcgtcttagacaacctaaggaagcttcctcctaacccatgattgctgctccactcctcggtttcccgccctgagtgccctgttcctttcccacagaggcaggtccgagaccgcggggtgacccgatccaaggcggaaaaggtgcggccacctacggttccggtgccgcaggtggacatcgtgcctgggcggctcactgaggccgaatggatagcgttcacggctctcgaagagggcgaggacgtggtgggcgacatcttggctgatctggtggcccgagtcatggactccgcctttaaagtctatctgacccagcaggtaggcctggatccttgtccttcagacacatctccgctctccctgacccctccctgctggactgagagcctttctcgccttcgcagtgcattccattcaccatcagtcaggcacgcgaggccatgctgcagatcaccgagtggcgctttttggctcgggacgagggagaatctgcagtggcagaggaccccacatggggcgaggatgaggagcccttggcttgcacgacggatgcctgggctcagggatccgtgccagtgctgcacgcccgggcctcggtggggctggaggagacgtctcaaggcgaagtaagcccagcctccagctgccgcccacctctcaccgccgcccccgatccattactcacccctaacctccacccctgtgcatttccccaggaccaagagagcgtggaccagattcctttaggaggatcgtggacggactcaggctctcaggagcggatggaatcttgggagctaacagtcaccccgggctctccacccacgtccgagttgcttcaggagacagggtcccggggtcctctggagaaactgggtgaccagtcgaggagcgaccagactgacctgtttgcagtcggatcctcgaactcgagcagccaactgttgatggagatggtgccggcaggcagtacccacgcttctctggagctgtccttggtagccagccctcaggcctctgtcgagcgggcacagcccatcagctctcagttatctctcgaggacctctacagttgcacgccccagccgcacgcggctggagaccggctggaactcagggaggagaaggtgcccctcacccccccgcaggtgttggtgtccgatccttccgagggcggcccgaccacgctcaacccctcggcgggattccagccgcagccgccgtgcctggctgacgagcggcccagcgcacttcactccagaactggccgtaagggggtaatgacgcgtctgaaccccgcgcggctgcctcgcctctgggtgcgcccgctgtcggaggtcctggtcccagactcggagggccgccccctggaggcctaccgggggcgccagcggggcgagaagaccgaagccccagccggaccgcaagcctccctccccagcttccgcgtctccgggtcagagttcttccctttcccacatggcgttcctgtccgagctttgggcccccgtctcagcctccagttacctactctaagcttaggcctaccgtcgccaggctttggttcaaagcttcccttccccagtcccgggctccgttttctcgccacacatcgggcgcgcccggacatggcacgcagccccagccccaagctatggccgagtgctaagtggcccagcggctgggagggggaggccgaactgctgggtgagctctgggccggccgcacccgtgtacctccgcagggcctgggccctggggaccaggagagccaggatcctcaccaatgtcttcatcccgtgcctcaagttctggaggccacgtcccaggtgacgtggaggcccgtgttgctgccaggagcactgaagctggctcctggtgtgagcatgtggaacccaagtacgcaggtgctgcttagctccgctgagcctcaacgggaggacagagaagtcagcgcctctcctcccatccatacaggcgccccgaagccacaggtgactgtggcacaactaatgaactcagccctcaaaatgtggtcactcccctccaagcgcctgccccattctaagccctaggcagtgggaattctaccttccttctgtctgcttgccagaaataaacagctgagtttcctttaaaattggcctgatgtccatcagttccttccaagtgtgtgctctcattgaactggagaggtctataagaacacagaacataattacattacacccttaggagaccctgctttagggtcaaggtggctctccaggagaggcattctggagaaccatccccatttccacaaaggagcacacagatgttgcaagagggatctgcctcagttgggagaacttagtctccttccagtaggggaagaagggggtagctctgtttaagcacagagtgattcaagacatgaggaatttgattttcagcccctggagctctatcaattcaccttagagtgcatatccaagttttctttggagacaaatttgaggctctgcaggatttaaggaaactctgactcttgatctttgacttcgaccagcattggaatgaggcaatcagatagctagtgaaaataatttaaggaggaactcactgtcaggtccaaatggaatactcgaacacatcgaagagtgagtgcctccttaaattttgtgctttatgctccacatcaacctgttggctggtgctactcagccttcactagtccttccctgcccccctcctgtgggcagcaattccctgtggcgggccagtcttctctgccatgtcgctgtggtctgtactcagcagcccagtatggggtcctggctctgtcctcattctggtcctcctgcttagactaagtgtgcagatctggcataagttttatctctgggacctccagcactgctccacggatttgactgggaagacagcagtggtgactggggccaacagtggtgagtgtgcctcctgacctgccacaaccacagcttccaactgccccaacagggagggcagagaggaggaccagctcccactgtcagaacccttgtttcccaccctacttgcttcattgccctctagtcactccccagactagcatactctgaagctgccctcccacaggcattgggaaggctgtgtcccaggagctggcccgccgcggggcccgtgtgatcctggcctgccgtagccaagagcgtggacagcaagccctggctgagatacaagcaacatctaagagcaaccgcctcctacttggtgaggtggacctgagctctatggcctccatccggagctttgctcagcggctgctgcaggagtgtcctgagattcatctgttggttaacaatgctgcagtctgtggtatgtgccttgacttacttcccctaaacacatttccagagtttcatttctagctcaaggacctcaaaacaggaatctttcaagcctaacctgtacataccatggaaactctaattcagacactatcctgaaaaacctaaaattatagtctcaaacatcattgcccccatctcaacacatccatgctcctttggtgtttttgtgctgggtttagtcactcagtcatgtccaactctttgtgaccccaccaggctcctttgcccatggaattctgtaggcatactggagtggttaccgcgccctcctccaggggatcttcccaactaagggatccaacccaggtctcccgccttacaggtagattcttgactgtctgagccaccagggcatttctgtcgaacccaatatatcctccccagactttgtctccctaaggattctcactccattacccaccacctatgttttcatctctcacagggttccctaccacacttactccagagggccttgatctcacctttgctaccaactacactggaccctttctgctcacaaatctgctccaaggtaaggaaggacgggtacttaccttctgtgtgacccctggttttccatccctctagcattttcatggcttactgtctatcatggtcatctcctttcccttggcacccagatgcatgctgagtaatgacccaatacattgttactttccatacctggcctcagtcaagattaggagactggtaatggaatcagttagcccccaaatatcaatacatccagcaagaggatataagatctacaccacacctctctttccctcaggtctgagttctagccagaccagcagagtcaggcatctcaggtctgagttctagccagaccggtagagtcagtcatctcaacaaaagcttcttgagggtggcattaggctactaggtttaaggaggctgtgttctcctagggaagggaggggttaagcagcaggcacattctccctaacattttctctggattgtctaatagcctctttataattttgtttattgattgattgatttttggctgtgctgggtcttttgctgcatgggctttctctagctgccctgcataggcttctcattgcagtggcctctctttttgtggagcacaggctctagggtgcgcggggttcagtagttctggcctgcgggctcagtagttgcagctcagctatgctggggctcagtggtcgtggtgcacgggcccagcagctctgcagcacgtgggattctcctggatcagggattgaactcatgtctcctgtattggcaggcagattctttaccactgagccatctaggaagctctctgatagcctctttaaaagaaaattaattttttggtcaggtaatgaatatatgtccaaagtacaaaagggtatatagaaaaagaaagaaaaggaaaactctcctcctctcctggaaaatcagctgcccattcccttgctgggaggcaactcctattgccaggtctcatgtaccctttagtgagcaattaaattagtcctgactggaaagtgaacaaagagcaaggccaagctctatgggtttgtaatgtgttaatatatgtttttcccttttctaaaaattgtaatatgctacaataccctgtgtcttgcttagtgataatttcttgaactgtcttcttgttactgaaaagtgtgtgtgggggggtctgactgctcgccactcaaaagccaataaacaggccaggttgatggaaaggaaagtttgctttatttcggattctggcaactagtggtagggagggtggcggacatctgtgcaaaggccgactccaccacctgacaagcagggggtgagagctttgatagacagagtgtgtgtaggggggagattacatgtggaaacagcacatttatctctaacagtcatcttcaattggtcatcagtggtctgactagcatcatcttcattgttttaggtagagttaatcttcagatccagggtctatttgttcccatttctttgtagtcagttttcagaattgtggcagctcctgtcctgggtgcagtctggtcaccatggagttaacttttccacctgatattccggtatctgtaagacaactcacaggatatagctcaacatattatctataacctttgagaaagaactaaaggtccttgactatgcttaatgactaaattactattatttagtcactttagactgttttcctttgtttcagccatttttcacttttctgattaaacttattcttcaattaaagttttctatagacaaaaggcaggcagaggacatggggcagggggcgggcaaggaccatatggtcctgctgtttcattctctcctgtctcttctgtctagtctattctcccttctgtgtcttctaagaaatcacctttcatcacatcactttcttgcttccaattcttggaaggtattctgacctttatacaataactaagctgtttatctccacttacaaaacctcctgcagactgagagcctagccttgacctttcccaaacccacacccaaaattcagccaaaattccttctctcttaggccacacgctgtcttctaaatcctggctgtaatttgcacatgtgtttccctctatgtgaaatatcctttcccatcctttcagcctggctaacttaattcagcttccagcactcagcacagataccattcgtactgcggatcctgtcctgacacttctgcctcccaccaggtgcccccatttacctcatagctcagttggtaaagaatctgcctacacagcaggagacctgggtttgattcctgggttgggaagatcccctggagaaggagatggcaacccactccaggatttttgcctggagaatctcatggacagaggagcctggcaggccgtccctgtggtcacaaagaattagacacgacttagcaagtaaaccactaccaccacccgagcccctgtaaacagctctgttcctgtacagatgctgttgcatgaagatcagcctccaactaggttgtgagcccctttggtctttatgtcactatgtttgcaagtctggagttctctgtcctctttaagaattttcttttcagcaaattatggctgaatacctccactcaatttttcatttatgattcttaatctaaatggagggctcaaaatagttttagtattttgaaacaataagtaaactcatatgtgataactataattttttatactttatataatctagacttttttttttttatagttaggacgctcttttctttcccaaagatttgcttgtacctctcctattgatagtaattttactttcattcttttggaagataaattccaaaaaaaattttttttaattaaaaaaaatgtttaataaacctctttcccaagaatctctgcacatatttctttccccctaaactgaggacccatatgtctttagtgcctagcatggtgtctgccataattcaggggcgcagtgaatatttgtgggatgaattagtgaatgaatgagtgtatgactgtgtgaaagccaattttcacagcctttccagcctctcctccccattcttagccatcagcaaaataaaaatataaacaaggattaattaaatcagcttcagctggcaagtggcagaaaagggaaaactccacttttactttaggcgaaaaaaaaaaaaaaaaaactagaataaaacaagaagaaccttccgaaagcagttaatgaaaatagtcaccgttcacgttacactgtgcactgggcccactgactgtcttctgaaagcctgagatggaccctgctctcctgtagtctcgtggagaagcaggttggggactgggcatgggggtttactccatgacttggattaagggtgtgtggtcttctctccacctaggggcccttcagcgggcagggtcagcccgggtggtgaatgtatcttccttccggcaatcacatgggtacattgatgaggatcatctgataggggccggtagacctttgaccttcaaccagaactatgattgcagcaaactgcttttggcctcgttcactgggaagcttgcccagagacttcaagggacaggtaactgcctctgacactccctgcccttccactcccaacactacctcccaacccttcccatctcattccaatatattctggccttaaaatactcccagtatcctcaagccagctgttaatctcctccatttatcacctgtgcacccagtatttctctcaaccccatcttcctacctccttttcattcttttccaactttctcatcatctacaacttccctctcctccaacaccatccatcatattccccctcaagatcaccccatgctttctaatacttatatctccttactggcttgggtatgggcactcatgtaagttacgaaacacagacttctctggcaccacccccaagtctcctgtctcgtctacccgacaggactgataggatccttccttagttgcacactgcagaaccacacttaactcttccttcccaccgtcctcctctcacctcactgcactacactgctcaggtgtgactgtgaactctgtggacccaggtgtcgtgtacacgaaaatcatgaagcatttctcctggtcatatcgcttcctcttctggctcctcagcttcttctttaaggtgggtagtggagaagctggcgctgcctgaagagggtgggtcagggctctgctgctccccgtcccggtaagttagagctcgcctggctttactcttcacttcctctgtgtctctacaggatagcaaacaaggtgcagtcccagtcctctacctgagcttagcaaaggagctggatggcgtttctgggaaacattttagcagttcctgtgtaataactctaccccctgaagctgctcaggatcctcacgtggcccaaagcctctggaatacctcagtccgactaacaaacctagacaaggtggactgatcttctgtgacccctgccttaaccagccaccctccctctgactcccagcccttactctgattatgccttctgtttgccaggtccagggatcaatctctttgtctagtagagtgaccacttcctctttctgttggttcaggggcatgggacctcagatcagccaggggaaagtttcagcttctactttattgctagttgtctgatagaagtattcatgtcttaggccctgggatctccagacctactgagtcccgcattgtagggacggggagtgagactcctttcaatgggtattagacgtgccaataagaggggaaacttctgcctatagcccttggttcctggccttggaggaggcggcaccacactgcgtcctctggatcaaggtgtgtgcctcatcctgccggacagcactctaactcctcagggtgctgtctcccagctgaaccgtaactgagcctacaggtcacccttccacctgtctatcaagtgctgctcctgagtgctgagtcctgcaataaagatagcgaattctgagagtgagagaccactgtttccttcaaaatctaaatgaattttgaactaaacgtttcaaatttcacgtatacaaagcttgtatgtgtatgtatctacttgggaggattgaagtttttatgacaatgagttgttctaaacatgaacagtgtgtacttttatctaaaccttttaaatatctttataaatttttgaataaagatcttacacaagttttactacatttaatttcagataccttacttttcatgctattgcaaatgatattttaaattttgtatattaattgtatatcattgagcaactttcagttcagttcagttcagtcgctcagtcgtgtctgactctttgcgaccccatgaatcgcagcacgccaggcctccctgtccatcaccaactcccggagttcactcagactcatgtccatcgagtccgtgatgccatccagccatctcatcctctgtcgtccccttctcctcctgcccccaatccctcccagcatcagagtcttttccaatgagtcaactctttgcatgaggtggccaaagtttactgttatctaattgtgataagtcatccatacattcttttggtttttgcacatggacaatcataccatctaggaataataacatttatttctcctctttcatattaatataaattttatttcttttcctagaccttaactgattttctactattaaaccaaacttgcatttaaaccaactttgtcagagtgctaattttgtatgaaagaaagtggaagttaattgcacagtcgtgtctgactctttgtgatcccgtggactgtagcctgcctggatactctgtccatggaattcttcaggcaagtttactggagtgggttgccatttccttctccaggggatcttcctaacccaggaattgaacctggatctcctttattgtaggcagattctttaccaactggtccactagggaagccactagtatataatttggtatacatggctaaatttagtatactcatgtttttatttggaactatttattcataaatgagactgacctgtactgtactttttcctacttatattgccattgtctagctttgctgtcatggatagcttcattttataggatgaatttggaattcatgttagtgtagggacgttatataagaaagtgttaattccttagttatgtctgactctttaagacccccgtggacttaagcccaccaggccactctgtccatggaattctccaggcaagaatactggagtgggttgccattcccttctccatgggatcttcccaactcagggcttgaacctctttgcgattccatggactgtagcccaccaggcttctctgtccatggaattctccaggcaagaatatgaagattcccttcagaatactaaagggaagatccaagggatcttcccaacccaaggattgaacacaggtttcctataatgcaggcaaactctttactgtctgagctaccagggaagctcttatataaaaagcagatgccaattaattgaagattaaatgtgtaagaaacatgctaggggaagtgcctgtgagagcaaagtggggagagaaagctaagagatccatcagaccatgatacaagtctgactcagagagaaggttggttggaagagtgcagtggaatgctttttcctttattttgggccatgttgcatgagggatcttactccctttaccagggatcaaacccgcagcccctgccagtggaagtacagagtcttaaccagtggacaaccagaaaaatcccagtttttccttttaaaaagtccctcttgtatacaatctatttctgttctttagtggttagtctaaaaatgttattttattgaccatgctgaatgcaggatctttgttcccccaccaggggtcaaacctgtgccccctccaatgggagcatagaatcttagtcactggactaccagggaagttcctgcattttaaaagcctaaaatcttaactgtttttaaaattaattttttttttttggctgcatggagtgttagttgccttgtgagggcttctttctaattgtggcctttggggtctgtagttttccacatacaggcttaattgcctaaggcatgtgaggtcttggttcgctgaccagggatcaaacccacatcccctgcattggaaggctgattcttaatcactggaccactagggaagttccatccctgcatttaacattatctttaatctatatctttattcttctttcaaacaatacatagatcttagaggtctttaacgttctttaacattaatcattctctttggattcatatgcttttataatccaatatttaattatattgttatctcattaatttcacaaatcagatattttgttattctaagtagttggcatttatatggatttactcatatgcctagtattttcttagttcattcttctttcttgtgtctctatccgggattatgtttcttctaccctgaagtatatgcatcctttagaagaagtccctttcgtgaggatttgtggtaaacagaactctaagatggctcccaagatctgcaccctaccctgtgtacacattctctataatcacttctccctgagtgtgagcagatctcatgaacatgatggaattttactcttgtgattatgttgtatatcaggttaatggtaattaaagtctgtaaccatttggctttgtgtatgtgccgtgtgtgactgcacaatattcatgtctgttgtatttttcttacatctttctacatttgagttcctcaaagctttccatagtttgtgtcattcaatcatttattctttaaatgaattaatggagtgtcaactgatccaggcattattctatatgttattgtcctgaagtaagaagtaaaatagataaatgttcatgaattcaagcagtatatattctagtggagtaagagagataataaaaatatgtggtaaaattacatagatatgagtgcttcttggcagaaaagctatgataaagctagacagtgagttaaaaagtggagacattactctgtcaacaaaggttcacatagtcaaggctgtggtcttcccactggtgatgtacagttgtgagagctggaccgtaaagagggcagagcaccaaggtattgatgccttcaaactgtggtgctggagaagactcctaaaagtcccttggacagcaaggagatcaaagcagtcaatcttaagggaaatcaaccctgaatattcattggaaagactgatgctgaagctgaagctccagtattttggtcatctgatgtgaacagccaactcattggaaaagtctgtaatgctgggaaagattgagggccgaaggagaagaagacatcagagaatgagatggctggatggcatcaccaatgcaatggacatgaacttgggccaactccaggagatggtgatggacagggaggcctggtgtgctgcagtccatggggacgcaaagagttagacacgactgggtgactgaacaaaagcaacagcaatgagtgctatggacataagtgaagcaagaaagaaaaggagtgtcatgataaggggcctgggtaaaaattttaaataggttggccagtaaaaaagattcaagtaacctgttgactttgagataatcaaaggggaccttattttgggtgtgttagttgctcagtcatgtctgactctttgcaaccccatggactgtagcctgccaggctcctctgtccatgggatttttccaggcaagaatactggagtaggttgccatttccttctctagggaatcttctcaacccagggactgaacccaggtctttgcattgcaggcagattctttacaatcttagccaccagggaagcctagcctaagtagtgagccctttaaaagggcttagtcttagcagtcagagacctttaacaagatggctctggtcagactctcttgccgcaccctctcatgctctctggccccatgttctgtaaacagagactttgcacaattatgtagctgagatcacttatagcactgtgtatgagcatcgtgaggcactcactgggtcacgggctactttgtgcattatacctatatgagcttcagcatggaagccccggctctgctgccctgagaccgcactgcagtggcatcatggtgatgttacacgaggttatgttacggctgtgtcatggctacactatggttacgttatggctgctgttacagctgctgcgtcagccaggagagaggctgtgttatggctgccatgccaatcaagaaagaaaaagcgtgtctgcagtgcctatggttcctcgagtcatcttccagcctcttaacttgtgccttgctcaccctgggttcagcaaacagtgtgaacagcaagacaactggcatcacgaacaggatcagcaatacaaccatgtagaaataaacggccacattgtggagaaaaccacatggcctctagtagttgaggcttcagttctatagttacaaggagctgaattttgccagtgaccagtgaccttggaagaggacctgggtcccagatgagattgcagccctggacggcaccttgatttcagcctggggaggtcctgagcagaggaccaagctaacctgtacccagactcctgactcatagaaactgtgagataatgttcagtccccgagtcatgtctgactctttgtgaccccatggactgcagtacaccaggcttctctgtgcctcactgtctcctggagtttgctcaaagtcatatccattgagttggtgatgccatccaattatctcatctgctgtcacacccttctcctcctgccctcaatctttcccagcatcagggtcttttccaatgagtcagctctttgcaccaggtggccaaagtattggagtttcagcttcagcatcagtccttccaaggagtttcagggttgatttcctttaggattgactggtttgacctccttactgcccaagggactttcaagagtcttctctagtaccacatttcaaaagcatcaattctttggtgcttagccttctttgtggtccaactcccacttctgtacatgactactggaaaaaacatagctttgactatatggacctgtgttggcaaactgatgtctctgcttttaatgtgctgtctaggtttgtcatagctttccttccagggagcaagtttcttttaatttcatggctgcagtcaccatccacagtgactttggagcccaagagaataaaatctgccgtgttcccattttttcccatttatttgccatgcagtaatttgagtgaactccaggagatggtgatggacagggaggcctggcatgctgcaattcatgggctggcaaagagttggacacgactgagcgactgaactgaactgaatggggccagatgccatgatctttgttttttgaatgttgactgttaagcaagctttttccactctcctctttcaccttcatcaagaggctctttaaaaaaaaaaaataaggctttttagttcctctttggtttctgccattagggtggtatcatctgcatatctgaggttattgatatttctcctggcaatcttgattccagattgtgattcattcagcccagcatttcccatgatgtactctcctttcccaattttgagccagtctattgttccatatctgtttccaactcttgcttcttgacatgcatacagtcttctcaggagacaggtaaggtggtctggtattcacatctctttaagaattttccagtttgttgtgatccacacagtcaaaagctttagcctagtttacgaagcagaagtagatgtatttttggatttcccttgctttttctatgatctagcagatgctggcaatttgatttctggttcctctgccttttctaaatccagcttttagatacggaagttcttggtttacatgctgttgaagcctagcttgaaggattttgagcattatcttgctagcatgagaagtgagtgcaattatatggtagtttgaacattcattttaggaatcactgaactaaaatggacagaaaggggtgaatttaattcagatgaccattatatctactactgtgggcaagaaacctttagaagaaatggagtagcactcatagtcaacaaaagagtccaaaatgcagtacttgtgcaatctcaaaaaggacagaatgatctcaattcatttccaaggcaagcctttcaacatcacagtaatccaagtctgtgccccaaccacgaatgccaaagaagctgaagttgaatggctctgtgaagacctagaagaccttctagagctaacaccataaaaagatgtcctttgcatcataggggattggaatgcaaaaggaggaagtcaagagatacctggagtaacaggcaagtttgccttgaagtacaaaatgaaggagggcaaatgctaacagagttttgccaagagaacacagtggtcgtagcaaacaccgtcttccaacaacatgagagatgacactacacacagggacatcaccagagtgtcaataccaaaattaaatcaattatattatttgcagctgaaaatggagaagctcttcacagtaaaaacaagacctggagttgactgtggctcagatcatcggctctttattgcaaaatgcaggcttaagttgaagaaagtagggaaaaccactaggtcattcaggtgtgacctaaatcaaatctcttatgattatgcagtggaggtgacaaatagattcaagagattagatctgacagacagagtgcctgaagagctatgtgagataagaagtgttttcttttaagccactgagtttgtaataattcgttatgcagcaatagaccactaatacaggatctagtgataacaaacttcttcaatttttttgtttgaagatttattttaccttcattgttttaaacttcaagagaagtatagttgatttaaaaaaaattaggtgtactacaaagtgattcagttacatatatatttaatattatttttaaaattcttttaattataggttattacagatattgaatatagtttcctatgatgtacagtaggtccttgttatttatttaattaaaattttaaattttacattggaacaaagttgatttacaatgttagtttcagcaaagtaatacagctatacatatacatatatccattctttttcagattcttttcctataaagtttattacagaatattgagcagagttccctgtgcagtagatctttgttgattatctattttatatatagtaatatacatatattaatcccaaactcttaatttatacttaccctcaacttttccctttcggtaaccataaatttgtttttgaagtttgcttctgttttgtaaacaggttcatttatatatatatatatttaaattctacatataagtgataccatatgatatttatttttctctttctgacctacttcacttagtatgataatctcgagggccattcctgttgctgcaaatggtagtatttcatcctttttatagctgactaatattccatgtatattccatgtatatattccatatatatattccatatatatattctttatccattaatcgttgaatcgttgatagacatttaggttgcttccatgtcttgcctattataaacagtgctgcaatgaacactggtgtgcatgtatctttttgagttagagtttttattttttccagatatatgtccaggagtgagattgctggatcatatggtaaatgtattttcagttttttaaacaatttccatattgttttccataatttccttagttccataagttggctgtaccaatttatactcccaccaacagtatagggggctctcttttctccataccttccctagcatatgttaaaaattttttagcacacttcctggcttgcaggatcttagttctttgaccagggattgaaactgtgccccctgcagtgtaagtaccgaggcctaaccactagaccaccaggaaattctccccagcatttattatttgcagactttttgatgacggacattctgactagtgtgaagtgatacctcattgcagtcttgatttgcatttctctaataattagtgatatcatgtgcctgttggttatatcttctttggagaaatgtccatttaggtcttctggccattttttaattgggttgttttttgatcctgatgctatgtcagctatttatatattttggaaattaattccttgttggttacaaatattgtctcccattctgtaggttgtcttttttgttttatttatgttttcctttgctgtgtaaaagcttttaattaggtaccacttgtttacttttgcttttgttttcattacccattactaggagatgtatccaaaaaaaatctgttgcaatttatgccaaagagtgttctgcttgtgtttccctctaggagttttatagtattcagtaggtctttctgtttggtcacatctcttgcaggatctcagttccatgacagccccaaatcctaatcactaggctaccaaggaactccctacgtttatgtctttaatccattttgagtttattttatatatattatcagagaatgttctaatttcatgcttttacatgtagtggtccaggttccccagcaccacttactgaagagactatcttttctcctttgtatattcttgcctcctttgttgtaaattaattgacaataagtttgtgggttcatttctgggcctgttccattgatctatatttctgtttttgtgccagtaccacactgttttgattactgtcattttgcagtatagtctgaggtcagggtgtgtgattcctccagttccattctttctcaagactgttttggctcttcagggtctttcgtgttcctatataaattaaaaaaaatttttttttgttccagttttgtgaaaaatgccattggtagtttgatagtgattgcattgaatctatagattgacttgggtagtatggtcattttaacagtattgcttcttccagtccaagaacatggtttgtatcctcttcaattcatctgtttgtatcctcttccatttctttcatcagcatctcacactattttgagaagtcttttgcctcattaggtaggtttattcttaagtattttattctttttgatgcaagggtaaatgagattgtttccttaatatctctttttgatatttcattgttaatgtatagaaatgcaacagatttctgtatgttaattttgtatcctgcaactttaccaaattcatggatgagttctagtagttttctggtggctgccttaggattttctatgtatagtatcatgtcattcacttcttcctttctaatctgaattccttttatttctttttcttctctgattgctgtgtctcctgtagtggaagcatggagtcttaaccactggaccaccagggaagtcccccactccccaaattgttaaaaagttcttagtggggcttccctggtagctcagtggtaaaaaatctgcgtgccagtgcaggagacacaggttggatccctgatctgtgaagatcccacacgccgtggaacaactctgcccgtgtgccacagctattgaacctgtgttctagagcctgggagctgcccgctgctgagcccatgttctacaactgctgaggcccatgcaccctagagactgtgctccacaaccagagaagccaccacgagaagcctgctcattccaactagagagtagctcccactcaccacagctagagaaaaagcccacatgcacagccacgaagacccagagcagccggaaaattttaaaagttgttagcatatttatcacttaaagacaattttaaaatttacattttatttcttttggacagcaccagtataactagtgtagacgcttctcttctctgcatctgtcctccgccatacctggctttgctacctttgatttgctctctgcctttatctaatcccttctccatgtctcagcctgaaaaaccaattcctccctcctggaaacagcattctttttttttagttcagttcagtagctcagtcatgtctgactctttgcgaccccatggactgcagcacgccaggcctccccgtccagcaccaactcccagagtttactcaaactcatgtccattgagttggtgatgccatccaaccatctcatcctctgtcgtctccttttcctcctgtcttcaatctttcccgtgtcaaggtcttttttaaatgagtcctttgaactttttcaaggggagtttttttccctcttggttcctccccattttctgaagtgcttagaagtctacccaaatgagcacagatgttcttctctgttcagtatcagggattggaaggatgggctctagtcatacaaattggagttttagggtctttggagtcttgttcatggtccctatcagacagggcctcaggttggcacctgtgaaaaagcacataagacagagacagtattaattttctttgaagaccactcagtctaattcaatataaaagaaacaatatgtctcctgtttgtatgtcgtgtcttcagaccccttttcatgatgttgaaaaggatttgggtctttcttgtatcactaccctgcttctaaccaatgcttggcatcttcacatgaaaactcagcatatctgttaaaggttgttaaagcactcagagagatggctcaagttcaaattaaaaatatatatttaaaaacaaattcaaagcagatcaagatgtattaatatggaaaacctccaagatgtagtgtcccatggagataaaaacaaggttcagcacagggaactatatttaatatcttgtattacctataatagaaaagaatctgaaaaagaatatctatatatgtatatatacaaatatctgaatctctttgccatacaccagaaacaacattgtaaatcaactatacttcaatttaaaaaagcaacaaggtttagaacagtgtgtatacaaagtcgctctttgcatctaaaatgcttgcaatttcagaggctgactctgggaccaaaaacaaaaaatggcatctagttactttgggtaaggaccttggggatgggataaatgaggtacgtgctgctgctgctgctgctaagtcacttcagtcatgtccgactctgtgagaccccatagacagcagccaccaggctgccccgtccctgggattctccaggcaagaatactggagtgggttgccatttccttctccaatgaggtatgtacttttttttttttttaaggtgcttatttacggtagccaaaagctagaaacgactcccaaatccatcaaatccattacaggtgaatggataaacaaaatgtggtgtgtatgtaggtatgtgtatatatatatatacacacacacacacacatatgtaatgaatgtttttcagctttaaaagggaaagaaatgatgacacatactacaacatgaacaaattttgaagacgtaaggtggacacaaaaggaaaaatattgtatgattctgtttatatggagtacttagaaaagtcagatttatagagacagaaagtagaatgcttgttaccagagactagggtggggggagaaaggggaattagtgtctaatggatacagtttccgtatggaaagatgagaaaattctagagacgggtactggagatatttgcaaaataaggtaggtgtacttagtgccactgaactgtacacttaaaaatagttaaaatggtaaattttatgtctgttttaccacagtaaaaaatacatgtatactgagccttttagaactaacacccaaaaaagacgtccttttcattataggggactggaatgcaaaagtaggaagtcaagaaacatctggagtaataggcaaatttgcccttggaatgtggaatgaagcagggcaaagactaatagagttttgccaagagaacgcactggtcatagcaaacaccctcttccaacaacacaagagaagactctacacatggacatcaccagatggtcaacactgaaatcagattgattatattctttcaaccaaagatggagaagctctatacagtcaacaaaaacaagaccaggagctgactgtggctcatatcatgaacttattgccaaattcagacttaaattgaagaaagtagggaaaaccactagaccattcaggtatggcctaaattaaatcccttatgattatacagtggaagtgagaaatagatttaagggcctagatctgatagatagagtgcctgatgaactatggacggaggttcgtgacattgtacaggagacagggatcaagaccatctccatggaaaagaaatgcaagaaagcaaaatggctgtctgaggaggccttacaaatagctgtgaaaagaagagaagtgaaaagcaaaggagaaaaggaaagatataagcatctgaatgcagagttccaaagaatagcaagaagagataagaaagccttcctcagcgatcagtgcaaagaaatagacaaaaacaacagaatgggaaagactagagacctcttcaagaaaattagagataccaagggaatatttcatgtaaagatgcactcgataaaggacagaaatggtatggacctaacagaagcagaagatgttaagaagaggtggcaagaatacacagaagaactgtacaaaaaagatcttcacgacccagataatcacgatggtgtgatcactcacctagagccagacatcctggaatgtgaagtcaagtcagtcttagaaagcatcactacgaacatagctagtagaggtgatggaattccagttgagctatttcaaatcctgaaagataatgctgtgaaagtgctgcactcaatatgccagcaaatttggaaaactcagcagtggccacaggactggaaaaggtcagttttcattccagttccaaagaaaggcaatgccaaagaatgctcaaactaccataaaattgcactcatctcacacactagtaaagtaatgctcaagattctccaagccaggcttcagcaatacatgaacagttaacttccagatgttcaagctagtattagaaaaggcagaggaaccagagatcaaattgccaacatccactggatcatggaaaaagcaagagagttccagaaaaacatcaatttctgctttattgactatgccaaagcctttgactgtgtggatcacaataaagtgtggaaaattctgaaagagatgggaataccagaccacctgacctgcctcttgagaaacctatatgaaggtcaggaagcaacagttagaactggacatggaacaacagattggttccaaataggaaaaggagtacatcaaggttgtaaattgtcaccctgcttatttaacttctatgcagagtacatcatgagaaatgctgggctggaagaagcacaagctggaatcaggattgcaggagaaatatcaataacctcagatatgcagatgacaccacccttatggcagaaaatgaagaggaactgaaaagcctcttgatgaaagtgaaagaggagagtgaaaaagttggcttaaagctcaacattcagaaaacgaagatcatggcatctggtcccatcacttcatgggaaatagatggggaaacagtggaaacagtgtcagactttattttgggggctccaaaatcactgcagacggtgactgcagccatgaaattaaaagatgcttactccttggaagaaaagttatgaccaacctagatagcatattcaaaagcagagacattactttgccaacaaaggtccatcttagtcaaggctatggtttttccagtaatcatgtatggatgtgagagttggactgtgaagaaggctgagcgccaaagaattgatgcttttgaactgcgatgttggagaagactcttgagagtcccttggacagcaaggagatccaaccagtccattctgaaggagatcagccctgggatttctttggaaggaatgatgctgaagctgaaactccagtactttggccacctcatgtgaagagttgactcattggaaaagactctgatgctgggagggattgggggcaggaggagaaggggacgacagaggatgagatggctggatggcatcacggactcgatggacatgagtctgagtgaactccgggagttggtgatggacagggaggcctggcgtgctgcggttcatggggtcgcaaagagtcggacatgactgagcaactgaactgaattgagcgtttaaaagcctttaaatttgtattttataccatttctctttaactgcaggggataaagaccatttctactagaattatagatacacttaatacttagcccagacgcatcctacagatacgcctgctcacatatggaatgtcatgtgtgcaaggtgactcactgcggcatcattcacaatagcgaaaattggtaccccctagaagaggatggctaacaaattatgtttccatgcaacagagtactatgcagctcaaaaaatgaatgaggaagatctctatttactgatttagaaaggtctccaggatatactgtcaaatgaagaaggtacaagtgtatatagtatgctatcttggggagcatgcctggggaggagtaagaaactgagcaacttgctgagcaatttgctaagtgagaaactgacaccaagggttaactacagggtgcaaggaggaaggagtggatagggagagaggttgcagtgaggttttgaatcacactactgcattatctatttagaataataacaagaaatacttgttgctgctcattcgtgtctgactctttgtgatcccatggacagcagcacgccaggcttcctgtccttcaccatctcctggagtttgctgaaactcatgtccactgagttgatgatgccatccaaccatctcatcctctgccacccccttcacctcctgccttcaatcttttccagcaccagggacttttccaatgactcagctcttcgcatcaggtggccaaagtattggagctcagcttcagcatcagtccttccaatgaatattcagggttgattttctttagaattgactggtttgatctccacactgtccaagggactctcaagagtcctctccagaaatacttaagatgatgaaatgggaaaaagaggggcagtagcggagagattcatcctttctaccatttaccacccccacttccacctcaccaacagttttagggatttttcaggttgtttttcaatctgagattaactgagacaaacataatactgcaatagttatatttcaggctctttacatgaatccactcaaatttacgaacaaccaaataatgtaggttctatccttaacattctcattttatgaaagatgaaacagaggttgggagaggttaagtaaacaactcaaggactgagacagtgggtaaacagaatttgaacccattgtttatcagatcctgactcttccaagatccttgtaaaaagatgtctgaacacttgttcttttttttttttttttcatttctttggcatcattagaagtgggttcattgggtcagggaattcatactttccaatgttttcttttttttcataactgagattttattggttgttttgaggatcagtacacagacatttcaatttgtacataattcttaacatttgtaccaaaaatctaaaaaaatcatgtagttttgattcttttctgaatagttttcctagaactctacaggttaaatttggaggcaaattttccttaacaggatatccagtacaatattggaggttccaccagtcacaatttaatgtcatactacacactcaaattttcaatcgttcacagcacattaacaatgttactaggagaactggaccaccacgactaaagatgctacagggcacaaaattctgaccaggaaagccaagatcaagcagtggttttgttgtaggatacaattctaccaaaaatatgggaagaaaagtaatagtatccaagatactggatgcacagttgactccaaactgccatttagtgtgctttatattatagagtataaaagctcacctcaatttatggaatgttactgacacctatgacaaccaaaacctcccatattcaatatcccactattttctggttgaaccaaaaaataaccagcaaatgattccccctctaaaaaaaaaaaaaaaaagcactgacacttaaaaagtggaatgagagaggattctctctttttaaaaaatgtttttagagctgtcaaaaaactggcgtttacaaaatagttgataaaaataatcgtctggattgtacaggaagggagacagatagagtgtggtattaatcagacttggcttctgcttcatcaaaggctgggctctccttcttttagtctcttggttagccacttcggccgttgttcccttttcccccgttttatttgacttttgtgtctgaagatttatcctttcctgccgccttcttcggcttcgtttccacttttgcaggagcccatttagctgacaatctcgcagatctcctcttgggctctttcttcggcgcccctcgtcggagcggacccgtctggggagccgtgacggccgggcgggagcgcgccaggtgcctgcaagccttcgcgaagctgaagtgcccggcagctgcggcaccctccggccaagtgtttttttaattaaaacatacccaagtccattatgtacatttgcattattttatatttaccacgattgttttaattaatagcctagcacgcaaaagcgtagcgagtctctgggggagctttgaccatacaagagtcgtccacgccttctctacgtcgtctaccctctgccggcagagggcgctggccaccgcgcgcctctcccccgtggtcctaatcggcttcccgtacagtacgcacgcgcaaatttcgctccaggtgtccagctttgtgcctgatcgaagtctccccggctgcgctcagcgcgcagggtttcacccgggctggtcttcggggaagagtagcgtgtcccccccgacccagaacacctccgggcctcagagactagaggtcctgagtgggcctacaggggtctggcggcacggcgggcagcccgtgcgggcggggtgggagcccgctaaggcttgggcgtcggtcgccagtggggcccggagccgggcgcggagcccctgacagtacaggtacggaggcggcgaccatggcaactgcctcctcccccgccgtgttcgcaaggctctcggctgtgttctgggggctcggcgctcgcctggggcgcggcggggagcccggcgtgccgggcaggggtcggcaggggtgggccgcggtgggggtgggcacccgcctgggtctggcctggtctgacccgcctgagctcttcagcctggcggggtcagagtgattgcgtctcccaattcttccggaactgcagggcttcccctcctttcctgggaacgtgcaaggcactcctgaacctattccaagctacaggtttccagtggggcacatggttgaaaagttgtcaaaaagcaaaaagaggactaaagctggaggccgatatgcgtttggtgtgtctgtctcccattcctggggtccgccttaactggcagggtgactcttgagcagtcatactgcgcatcccccaaactaagtcacacagatgaggagctccgctgtttttcaagaggcggcgatttagaaatgtaccctcttttgttacagtctggagaccagcaagctcgtcctgaccccttgccgatccagtatgcttaagacactgagggtcagggaacaacgaggtgaaggttgacgtcctttacctaggctacggccgaagcccaaggcacggggatgttaacgatagtagtaaatgacaacgtttttcccagaaggctttttgtgctcagatatgtttagaaacttcatggttccaagttttctcttcccaggtggcgctagtggtaaagaactcccgtgccaacgctggagacaggttctatccatgggtggggaagatcctgtggaggagggcatggcaacccactccagtattcttgcctggagaatcgcatggacagaggagtctggcagcctgtagtccgtggggtcacaaaagagtctgacttaaatgaagggacttagcatgcagcacgtggatgtttagaaacttaagctttcaatatgctgatagtatttttaccaagaatttcccactggaagtataggatggagtttcccagatttgggtggaaaatactgtttttcttgggtattgcctctttagcatataagacaatttggaaaatggagttccagaattggaaactcaagatttggaaggggtagtttaggtcagtgcttttcgaacttgaatggtgcatacacctaggggtcttgttaaagtacatgctttggttggttctacattttaaacaagttcttaggtgatgctgatggtccatggaccacatacactttgagcacaagggtgtaggtctctgggttggaagagaccatgttctattccttgccctccagaacaagctgtgctaccttgaataatctcttcccctgtccaagcctataaaataggagactggactagaagagcgctactgtttctttcagatcttgtgatagttgaattccttctaaaatattcttgcccaatggccagtttgggcttgaacatttctagtaatggggaatttactgaatgtaaggcatcgcatttcatcacgagatagctcaatacagaagtttttcatgttgctaaaatacatctctataacttccatcttgttgatcctagcttatcttttagaatcagagaaataaaaaatataattcctctttaaaagatgagtcttgggaattccctggcagtccagtggttaggataattctttcactgccaagggtcagattcaattcctgctaagggaactaagatcccacaagctgtgtggcacagccaaaagaaaaaaaagattcttaaggtatgagatgaccgagtttctaccatgttttccccaaactgaattgtcctttattcttccctggcattgtttcagattcctgtctcttaagtctcgtcctcctgtgtggagggtagtggagttgtagcaggactttgaaggacgagtggggcttgcaaaaccaggggaagcatcctaagcgtttgacagtggtgcggagatatgtcagatccagaacggtttgactcaagcaggaaatgttatgtcactgaaagatttggggcaaagcaatactttacagtgtgtagtcgtcctcctgtagtgtgtaatgtggttggaaatgaggaaagagagaggcagggaaccagacaggctccacataccagtaaagatggcctaggatggtgataatagtaatgccttctatttatgtaacgctttacagaacttttcacagagagcctttcctgtgaggtaggcagagcagctgtgaccctgttttatagacggggcaccaaagagggtaaacgatttgtcttaattctcaaagctattacatggcagagcaaagtgatgacagtggtaatggaggagaaaggaagaatgtaagagacaatactgagaaagagctgataagttgggcctgactgagcatgagtgcagaggaaacgaagttgttagggaggagtcagaatggttgggaaaatcatagtacatgactcacagctgccgtaacttgtactctgacagatctgacattgttagtagctctttggagttaaaggtcagaaggtattgtagaggattcctaggtggtgtgtgggggcttgggttacctgtcccatgctgagggaaatgagaactgggtattcagtgtcccctgagaaggtaagtgctgagcagttgactgattcaagcctatcttagggtccttgccatcctgaagtttctggatgtggttttatataatttctctttcgaagttccagcttgtactggttgtacttggctgacaagttggttacccagtctgacttccctaagctctgatgtatccactgagggtttcaaggaaacagagactggattcctgtcactcctaaaaccttacgaaagctattttcccaggtctgcacttctctagagcctagaggtctttctttctctgtccttttaccttagaagcatatgaaattgagatttattgccactactgaattccataggaactggagctgtccatgcagttttagtttttaggctcctaactggagaagaaagagctacctttgctggagtgtatgttgtatttcccctatggtgtctctgggaaacgtattagagccaacttatatccctagagcttgatgttggtacaggcttctgttcagtgcttaggataactgagatgaataaaaactctgccctggaggaattcatgatgggataaggaagacagtattgtaaggaagcttccctggtggctcagaggttaaagcatctgcctgcaatgcgggagacctgggtttgatccctaggtcaggaagatcccgtggagaaggaaatggcaacccactccagtattcttgcctggagaatcccatggacggaggagccaggtgggctgcagtccacggggtcgctaagagttggacacgactaagtgacttcacttcactttgctactgtaaggaaaatgtggtcttgtgatagagatatttccaaagatctgtgtgagtgcagaggagggaatgacagctccacatggagacatcaagagaatcttcaggaaagaggtgatgagtaagtagagccttgaagagaaaggacatggtgatgtttgcaacatttgcagaagcataagatagatggatccaagtttctaagaggatttgggaatcaaagaaggggtggttgatgagattagattcataatgaggccaggttttaatggcctgtagttttgttctaagatggacttttgtgggagggaagtctggagcttttcaggcagggatttaacttggttatattttgggaagctaattgtggaaatagactgaaaggggaggatctggataaggaacatcaggagaatcttgtaataacctgggcttggcttcgggctgaattaaggattagtgaggatgggaagaaggggaggaatcagattgtagagacagagattccctgatgtaatgactaattaattgagaacaagagagggaatgtccaggatgactccgttttctatgctggatggaaggtggtaccagtaaaaaggagaatgtagaagaggaacattttctgggtgaagattccatgtgttttgggtcacgttgaatttgggggtctgtggcacttagcagataggtggaaatgtgggtctggagttcagaagagagtttgtgccttggggtggtggatgatgctgttgaaatggatgatcccagtcatgcttacagaaggctgaagatgatagaggaaatgacaaggcttagtgggcaaggtaagagagaatgttgtccagggagctacagagggaaaagttgccggaagagaatcagcagcttctgttgctgcagagaggtcgagtaggatgagcttggaaaatgtacgtggagcttgggcagttaagagattgtggttaccaggactcatttttttttagtgtgtgcagctgtagtggagtcataaggacaggaggcaagtgaattgaagagtggatggaaagtcaggataaggagggtgtacttgagtagtttggcaaggaaggaagaaaggaagatggtggcagcttgtggaggagtagcagaaacaagcgtcaggtttttctggaagtctcgagcatgggttatctgatgagaggtcacatttgaaggtacaacggaaaagatgatcgcagaggagggtggagggttgcctctgaagagaagacatcgtttcttttgaagaggaatgactgaaaaaagggaaaaaaatgtaggaagaaagaggcaatgatggacacatctaaatttgcaaatagggtccgtttcctttctcagcaagattatctgttgggggaggggttctggtgtgggctcagataggaacagggacttgagagtggcaagggaaggcttgaaacaactgtccagagaggagagggaaagagagcagactcaagatcgctccaagaacattgcataccctctgaacttgaatcctgcactgaggtctctcttttcctctccttcgtaataatgatggctgtcatttattgaatgtgtcataccaggcactcttataagtgcttttcagccctgttagaaaagtattgttattacctgtgttttacagaagaagaaattgaggcatggaacagtagtatttatgtttgatgaatctcttacttctgcagaaatggcattccttctctgaggcatcagagaaaggcagaaatttactcccaagtcccagcttctggtcttgaggggctggagtttagggctgataaggagggagccttaccaggccagtctgtgggtatgatagtggatgggtgggcagggtggtggggtcagtgttgctgctatctttttgcaactacatatggaattctgaaatccttatgtgacttcccagcagcctgactagaaggacaagtgactgtaatgatttgttacgtattgcaggctgacactgtgtcacttgagatggtgaataagaaaagagatcttgtctcagtcagccagaaaaaaaattttttttctgccagttatgggactaggcagatctatagcctttcataacaacatacattattaacactcacctttggtgttttccccattggtgtgatagaatttgtcggtaaggtgcacacctgacttgagtgagagaggagaatgatgagatggcatggatggaagagaatggacttacctttcctgctgcagccactggagcatcctttctgtgtccttcctcttgaggttgccatggatacgcctttgcttggtgacttgaggggattgatttccgttatgatcagttgatgacgtgggtttaaaaagagaaaggacagaatgctctgcttctggggagtggctagtgagctgcccaaaaggcagagccaagcgtagccgaggtggctgtggctttgctggctgctttgggttttgctgaagttgtgaaatggtgcatctctctctctacagcgcaggctcagggttccctgtccacagggtcctagtgccaggggcttgttgattgacggaggggaggaagcagcaggaactttgaatagtctgttaagtgggacccccactagctctgggagggttgtggttctcgaatacagggctgcactcaagtgcctgttgccttcctgcaaaagcgcctttcttgaggataagtgaggcgtattgtgtagctttccttgctggaagtctgggccctttggaagcgggtctggcggtcactgggtattcctagaggggaatatcctgggagggagtagacctgttttcagtttgggagtgggctacagaaatttctggggataaatgaagagcttggagaggttagaaaaaaaagtctgtttagggtctaggtcctgtctctgagatttgcaaggcagggacaaaaggctccatgtatcttctttctgggtatatcaggaatccagccttccaagcttccagtccccaggcttctgttcccctctcctttcctgactcttgagggacttatatccacacgtatccgcaccgcccccctgccactagtgcttttagagatgtacaactgcaccctagttttaagaaaatccgagtcttgatgtattacctttatgtttcattttatctctttgcaaccaaatcaaaatacccagtgcctaatgcagttcagttaaagtgtgtggaccctgctgtcagactgcctgaatttcagacctctataggtggaatcagagaaagcaaacgattgggttagcccaggatcaaggtttggtaaggtgagacaagaagaggtcaggggctcaaaggatactggtacaccagtaaaaagcaaggtggaaatggtacagactgggtgccaaagagacttttcctccttaccagttcctccacaattcccaatatctgcttctttttctgtcatgtctgaaatgttcaccaagtccactggtaacctgtttatcagacttagattgtgtccctcatctcttcccgttttcctactttttacttttttatttttagcagtttttaatgtcattgggaaggaaaatggattggaaatccagggagtatctgtcttctggttggggtaacacataacttataactgttctgtgtgacttgggatgggtcccaaagatgctgttgaaggaccccctacctgtggttgttcagtcgctccagtcgtgtctgactctctgcgaccgcatgaactgtaaccgccaagctgctctgtccgtgggatttcccaggcaagaatactggagtgggttgccatttccagctagtcaaatgtgccccagtggctatgagacttagagttgtttgacttttgagacttgtaaaatggaaataatggaacccgtgttgtcttcatcacaggttcgtgttggaaggagatcgtgaaattcatatgttagtggtcacggttaaatttgcccctgagaagacctcgtgacttatttcctctctcttaacgtgttcggtttcccttctcagctctgttatcgtcattctcattgttcctgcttgagaaatcccaggtttattcattccttgacttacccatgcactcatctttccatctacttattcgcacaacatctgagttcctactgtgtgcagttgtcagtgatgtaccctctcagtggtgatgaagacagtgtctacagtttgttgaacacatattctaggccaagtgctgtgctaaatgctttacttctgtcttagttaatcttcacaacatccctgtgaggtaagtattatttccccccttttttcagataaggtaacgagggctctgaaaatatgttacctagagtgataccagtgaggaaatgggagaacccaggctgtacccagatctgtccatctccagagcccatagaggcctgcttggtgctgctttcctcatgtttgatctattgtagctccttctcagagttgggttttttttaggtagtgtctctgagttggtccatttcttcttccctttctttttctcttacgagcctagttcgacccctcccgcccttgctcattattgccgttagcgtccttgctgtcatccctgtctttatcaagttgctatgcctcagcgccatctctctgtctgccacctgtttgatgttcctaaaacagttttcactatgccagtctcctgctcgggaagagtctggcttcctgttgctattggacccaattcatctatctctacctgttgttaaactccctgaatctatccatatttaccttctaatacatctcaacatcagtgttagttctttcagtaatatttgacactgtgtgccaagagtgatggaatcataaagaggaaacgtcgtggagtctgccttaacaggcttacagtttgataggagaactcatcgagaattctttacttcagccaagctaggcatctttaatcttccccactcaagcagaattattctttgtctactcatactgtcgtcacaaattatgtttgtaggcctttcctttccacatattccacccctcgccccgcaaaaaaccccctcatataaggcataatcaagtacccttgttctttctagctcaccttgctcctctctgtagttccttataatatgtatacctagacattttaagacctgtagagcttttgcactttttatagagcacttttatatgctttatcttatttgagtattaatgtagatatgccaggtgacagtctcactttatagaagaaacagcatccaagaagttagatgactgtatatacttgtgttgctggagagttctgtgatgtccttagatgtgtgctcctttgaatctgggaaggtaatgtggtccggaggaagaacgtgttttggaggcctggaactatgtgtggtaacagagagcaacagtgcacagggttctgattcaggctttggctctagcttcggctcctctccttgccttctgtgtcacttcagagaagtcactcagttctccaagccccagcttcttgtcagcgttgttcctagcctgcctctctgtggggttattttggtgtccagatttgatgataacttttgttattagctaacttttgttgagtactcactgaataccaggcgctgtcctaaatgtcatacgtggattgtctcagctcatccttatagcagctctgagatgttctttgctcgcggttgacaaatgagcagattgaggcgcaaagatgttaagcagctggttaacaagtttttgtagctatcaaatggtgaagacatgaattgaatgtaagcagtctgagtctagaactgagtctactcttaaccacactactaacgagtgtttttttaaggtgctctgtagactgtaaggtgctctgaacatgcagaagtccagtttgcaaggagctgcgtggccctgcctaatggtgaatagggaaaggagggggcagcatggatatgttgcaggagaggagagaaatggtttcctagggggtctgaccggcattggagatgtggagaggtgttttgggggccctatatgtggctgttggctgtcattctactattaggctctctggttttccttagaaagtgtaatggaggaagaccctgttcggccagtgaagcccagcatggacaagacagctagccctcagcccaggggatctacgtccatactgacctggtggagccataggtcagaccctaggacagtctcgtgggctacttaggggcatggcaacctttgccagttagggggaagctggcgtacttgacttgctttgctgtgtgtgtgtgtgtgtctgtgtctgtgtgtctgtgtgtgtgtgtgtgtgtgtctgtgtgtgtgtgtctgtgtctgtgtgtctgtgtctctgtgtctctgtgtgtgtgtctgtgtgtgttgacttgctgtgtgtatgtctgtgtgtgtgtgtctgtgtgtgtgtgtgtgtgtctgtgtctgtgtgtgtgtctgtgtgtgtgtgtgttgacttgctttgctgtgtgtgtctgtgtctgtctctgtgtgttgttctgtgtgtctgtgtgtgtgtgtgtctgtgtgtgtgcgtgtgtgtctgtgtgtgtgtggagttgcctctattgctgctcttcctttgctatgtattgggcatggggcctggctgctctggcccaggatgagattgaaatttcaaccctgatcacgtgggtttgaaccgggctcccaagtttagaagggagagggagaaggaagagcatcggaaggggtgagcgacccttctggctgggagaggccctggcagctgattgtttggaagtgtcacttgaagctggcagggctgctgccctctaacatcgtgggggtgggcgggtggcagagagggtgagggggtgcagaccaggagaggcatcagggctgtgctcccagcgtaagacagtgtcctctagaggtgagtgttgggagtctgtggagtgggccctcgtcgcctcctcgctgtctgtctggcctggcccaggtgcagcaggggggcactaggacccagaggctagctcggttcctgacaagtctagagcagcactagcgcagagtgagactcatcagctggcaagcaggattcggtgtctctgggttcaggaatcctccagcagcagaggggacttgctcctcagcccctttctccattccctcccctaccccagtaggccacccagtgaggcccatggacaggggagggccacgcctgccggcttctgtgtttgtccatgagggcctggagccctagccctcctgcctaggtctctgccttttctctctgtctttggtcagctgggggagggggtggaggccgagtgagcaacatggcccagagcaagaggcacgtgtacagccgggtaagtggccctgatctgggatggccatgggagggctgctggagaaggcctggtgcctgtgggcagtgctgtgggggctgggagacaaagctggactcggccggggccactcgcagccctgatggggttagactgcataggcctcccttcccagagttgggccctttgtgggtactggtgaggcctgacctttgactctagctggacctcaggccagaggttccttagggggccggacttgtcctggggatttcaaatggggttggtgggttggaatggcctttattgtttgtcgcttgctttcttgctcttctggctcaggttggctctgtagccactgtgtgtccacctggtcctgaggtctgttagggttaggacggtggtgacagtctctgactttggggccagccctgatgtgcctgttagctccttttattgtcaggtacatgagagctgctcaactgtcccaggtatgacttggcctctcatggcccctgggaatggcatcctcgccttcttggatgagttctttggggaagagagttggggagtgactggctctggcagagcttccctaggaggccaagcgggagcatcagaagggagccctgtgaggtcttcaggtccatgctgtcactgcctcatgcctcattctctgttgcgaggcccctggttcatggagctgctgttgctaaaaatggcttaggtgtgattttcttctaagccatgggcctatttgggacctgatttcatgtcttgtcgtcacgagtatgtcagaagccgagagcttcccaaggacaatgtttagtctattcccttggcttgcctattcatttgggccactgggcagagtcgggggacagtttgcaggacagatctgagataccagattggcctagcctttatatatttatttatttgtagcaagatagcatgagtgaaggatctccaaagcttatagatagagttgatggaccagggctgaggcctgaaagaagggagttaaatggttgaatgggcttggtgaggcatctcggggtgtcacggtggggtgggggagggcagattgtagaggaggcacagttgtgtgccactgaaagggagaggcctgagagagccgtgtgaacctcagggaggacaggcagaagcagggaggggaacaggactctgcgggaacactcactggctcacctgtcttcccagctccggcctctgtgtcaggcagtgggttgtggggaaccactgtaaactgagttaactcgcttgagcttcattcccctcctaggggacagtgctcctgagaaagtagccatgtggagtgacattcacagatctatcaatgaattctgatttattaaagttaaatataaactcctaaaaattctcagattccagggcagtttgaagaagttttataacataacactgacatttttccaaaagcaatttggtaggtgttggcggggggcactctaatttgagaatggggttcaggcaagtgaactctggtcctttttcaggccaggatcctgactggggcctctctttgatattagaatgacacccttaacttgaggctcttaactgtgtatgtttgcatgtgtcttccagactcccagtggcagcagaatgagtgctgaggcaagtgcccggcccctgcgagtgggttcccgtgtggaggtgattggcaaaggccaccggggcaccgtggcctatgttggagccacactctttgctactggcaaatgggtaggtgtgatcctggatgaagcaaaaggcaagaatgatggaaccgtccaaggcaggaagtacttcacttgcgatgaaggacatggcatctttgtgcgccaatcccaggtactcacttcctgcctctgtgtgtgtgtgtgtgtgtgtgtgtgtgtgtgtgtgtatgtatacacgctctgttgcatgtgcagctggtgtgttggtgttctcttttcctgggcatgagcctgagtctctggttgggagagtgggaggtaacgagggagggaagatcgagagctatccttagggaatctgccctgtactctaggcttgcttagggcctgaagaggggcccatattacatccagccttgatctagctatactgagtctattctgtggcctcagatccaggtatttgaagatggagcggatactacttcaccagagacacctgattcctctgcctcaaaggtcctcagaagaggtaacaaccacccacttaagttgcctcctcacacgcaggagtccccaggacttctccccagaacaaggggccgcggtgtatcctgcgactttccgtcaccaccatattctgttgttccgtcttgcccagcctgccgtgatgttctctgctcctgtccctctatacaaacgcatgctttgtttctgtttgcattctacagagggagctgactcaaatccaaagaccagcaaactggtgagtagtcagggatgggagtggggagtaatggaggaaagagtgaaaagagaaaggagggaggcccatactaggtcttactcatctgctgcttccgcccgaggcagtgaactgagttagcctttccaggctccgtcctctctgagaaggaagcttttctgggtatgagttgctgctttaggtgtaaaggtgctagcagggaaaagctgccaatgcccagaagctctggatctgttggaactgaggctgggggtgaaagggaggactgtctgcccctagtagtgttgttgccaacttcctaccttttggtacctgaggctgccgtcatctgatggatgtagggtagggggaggaaggtgctctctggttcacaagtaaggggaaaggagctgggccttctgccatcttttcaggttgtatgtagagggcccactgcagctcccctctactgctctgtagagggtgtgtgaggtggggctcccagctctccagctcctctgggcaggctgtggacctcctggaagctgatcttgagggaggcctcatctcacttaccctggccttgacagtgacctgctcctcccataccggtgtttgcctgttggtcttaatacctacacccaagatgtctgaccagctagcacagtgttgtttaagtctgttctctaactctgccctttccaactcctcatgcagcggggactgaagcctaagaaggtggtgtgtttactatttgtgcctgggtgggtgagggccatgagccccctccccagctgtcctgcatgtccttgggctgctacatgcatgtatgtgtgaccttggggctgggatggccagaggaaatggcagccttggctttcagagttcctttgaagggtgcgaggatatcaggctcagtgtccaggcccagatcgcgttagggacgatcgccactcctcctcacaccctgcccatcgcctcgggacttctagtcagagactccaagcatttgactgtaaatagagcagcatgggagagagcattgactgggtcacagtggattctcactcggcctgaactgagggtcagtgggaggggagactgggggtgtggaggtgaggagcttagctaggtagatgggaggtcagggagccaagcacaggacgagcagtgctgagtggagagcctgagtggggcctgcttctggtgctgtggctggaatgcacacctttgctctgctccgtccttctttccccgcgtcttccttcctctggtgttgtgtccggggcctacctcccacaccttacagccttccatcggccatcggtggagtggggctgccacccctgagactcttccagtctgaagttgctgccatgcccacttcctcacaccagctcacgccctcgggctgtgcccaagccgcctccgacctgcatgtgcctgtctggccttcatgtgctgtgctgtgtgtatgaagttctgatttctttgtcacctgtctgtgtcagcaccttctgactgtgcatggagaactgttagattggggcagtgagaggggagagtggaacttctctattttgatttctggttggtggtgggtcctcactttggagtcttgccttggaagagacgacatgatggtccttgctttggggccctggcttgggaggggatgggggtatacgaaggaagataattctctaaaggacgctgggcccattccaggaacttggcttcttcccttgattattggctcctggctggggctcccatcttgcatcagaccccaaatagagaagagcatggacctgcagtctactgtctatggaggggttctggctgcagtctgatctgaccatgagtgggacgtgagccgtgcccagatctggctgactagggaaatgtggcaaagcctagcctaggctgcctgcgctgaggtacagcacctcctgggctcatggtgcagagtgtcagtcaagttgtcaagtccttccctggttctttctttccagtgcttcgctcgcagcgcatcacttaacacaggaaacagggagctagcacagaacaaaagaagggactttgaggggcagggtggaagagagggcctggatgtctctgcaaggtgcccagtcctttctggaagctctatagagacaggctctaacctgcccacaacccagggagagttgggaagggagccagatgctgtcattagagctgctactgcccagatggaatgttctccgggtttcttagtgtgccctgcagagctgatgcaggagtgccgggtgtgtgtgcctgatgagccaccagcagggtatcatctgtgtgtataagagacagaagtagagttgacggggttgtagactgaggggagtgtgagtatgaggcctgatgaagcagtgaggtcccatgtccctgtccagtgataccctggttccagagaggtcatcacagaaatgggacggcccccagcccaatttctttgagcaaatccttggggatgcgggagagggaggagccagccagaacctgttctttggaggaggaagcagggtgggtttagcagaggactttgtccagtcaggaggaggaggaggaggaggagccatcagagcctggtggttgctaggttactgaggagcagtggctccacccctcgtggagcagaggagggtgggtgcatgacgtcaggtggagctggtgcggcggccactgaggctgccgtcagcctaagctggcgaagtaggccgggggcctcccgagtgcctctccggtgcctgccggagcctggccatccccaccgtgcaccactgggggcttctgcatctgagctgcagccgttcgccagctggggagctgccgggccggggagctgaggctgcattgttgggatttgatacactaatctcctgtctccgccgcctttccctctgttcggtctcttgccctccctcccttggcctgtccttcctcctctttcctctcctggctttctttggttttctgcaatgatgagacaggcaccgacagcccgaaaggtactcttgcttgctctggtcctgctgccaggttgccagtgtgatggtggcagcgggcgctggggtgggggtgggggctgctcgacttgctctgtctggttgggggacaaggatggggatgaaggtgggggggggcgcagggagagtgtgtgtcactgccatgccccacaccctgggcgtttgctccctagccttcctgctcttggctctgaatctgtgttttgggccttgtacccagtggcctcaccagcttgagcttcaggcagcttttgctgcaaactggctctggatgtgtttcctaggagggaatctggggaagcaggtccagatgtctttgtgcctctagcaagcctacctcactcgacctttgctagaatgacacttggttgcaatactagcatccctccccgactggggtctgtatcaggggctttctctagaacagtttgtgacacatagttatggaggcttaacccagggtagtagaggtgggggttggtttccctaggagacctagaagggcccaggccaaatcttgtgtttgccagagctctgagcccctgggtatcaagaatactgtctgggagttggagttaatcatctgtttatcactttgcaatagtctggggtggttgatctccgatctggtgtagggcagtagtttccctatgctgctgcctacccccacctcctttcttgcagccgggtggggtcactttgctgagctctgggcttctggctaatgcaatattcatggtcgtgacacctgagccctctgccatggggatggggactgctgcaggaactggtcctggggaagcgggtggggtgggccgtatggccgcactgtgctcccttggggacctgatctcccctagctggtttcatatcactcctaggcttgtatcatcattcttgtcacgtggtatttctcaggagtcctgtgtggaatctagcactctaaggaaggggctgacctgggaaagtccttgggagtggtggatgggcggggctctgggctggagtgggagaggtggttgtgggaggactcctctctggcctctggagaccctctctaccagctgctggctttggtctcacatggctcagcctgggagatggggacagaatttccagggtgtccgaaggggtgaggcctacaagggtaggacagaagtgggagaaggaaccagtgggaaataggagttccatcctgaagtaagatcaaggtgactcacgggaaggagggcacggggccgggttggggaggagggggggactgctgactggagcctcgtggctgctgcttctgctctcattgctgtcccttctgctgtctgtctttctgccattaccctttctttcctgactactcctcctctggctcctgtcgcctgtccagactacaactcggcggcccaaggtgaggaaaaaacaggcctctgtaccagccactgctaagtggacacagatttcttaggcgtgtgcatgtatgtggcccttttgtatgagcaagtgtaagttggtcacagcgtgtcctgggttcccttaagaggagtgagggttctgagggtaaggacaggtccctcctgggaaagtggcttccagctcttaggagcatgtctgagccagcagcttgagtgtagaagagaaccgagagtggttgtggttagccaaggcagactttcttgaagaagggcctcttcttccagctgcttttgaccggcttttggcgggtgcgtatgtgtgtgtgtgtgttgctggggaagaggcagggaattagaagaaatgtgaaaaagaacttggaatataaatgtcaggggctatggaggtgggtgtgtctgtgaaaggccttgtgcgggggcgtccgtggatagcatgtggtctctgggtgtcagcccactgggagggctttagggctcggcgctacagggaggagcactgggcaggcctgtctgctctagcacctcagctccacagggacccgggtactgtcacctgattagagcccctctgtcctggaggagggaggtgacagatgggttggcggtacggaccttgtttcagaggagagccaaggattacaactttcaccctggcccttttacttgcaggatcccctaaaatagaccagggggaggaggatgagcttgatggtttatcaaagtgtagagcccaggacccccagttttagcccagccttctctgagagcgtgaaaattagagatcagtctgttctttctctctgggaatgacactgaggcgcttgttccctctgggggaggtgggtacaggcccagagcaacagtagcactgggaatattaagaaattgctacatgattacaagtgggtcacaaaaggaatggtcaagggagtgagggtttctgccctagcagggtagtgctagaccttggaggaatgtggggtcagtgccaagggaggagtctgataatcgtatgtcttcttccgtccctccctcccccgccatccccccacccaaatcccgcccggccctttgtcactgcctctgactgtggcgctttccctctgcccttcactgcttctctgttctctctgtcctgtgattttgcctttttccttctctgtcacttccttcaccatatgctcatattctgtctcactctctttcactacccctgtcccctgcactttttctggtctgcccctgccctctcggaatagcccacccgcccagccagcactggggtagctggggccagtggttccctgggcccctctggctcagcatcagcaggtgagctgagcagcagtgagcctagcaccccagctcagactccgctggcagcacccatcatccccacgccggccctcacctctcctggagcagcactcccacttccttccccctctaaggtaagctctgggtttggagcaaagaagaaccaagacacaaaggggcctgtgacccctgagagggtcttagaagtttcccgggttgggggagacccagaaccttggattagaagggtgggatcccagcatataagtatcccattcctgactaagccaccctttcctctctgcccttcttctacacttcccccatagggattgggctcttcacagatacttgtatgccacttgctttggccctggacctggactgttacctgcacacattcctgtccttgctctccagcttcgtcttgatggggaaaagcggggaggctatgcacggactgaagggtctctcctttgcaggaagaggaggggctgagggcccaggtgcgggacctggaggagaagctggagaccctgcggctgaaacgtgtagaagacaaggcgaaactaaaagagctggagaagcacaagatccagctggagcaggtgcaggaatggagaagcaaaatgcaggagcagcaggcagacctgcagcggcgcctcaaggaggctcggaaggtgggacctgggatgaggagggtgtctggggaggcacggggccaaggaggtgtgctgggagctgggaccggagcctggactgtcctgtgagaaggtacgtgaggcatctctgtgattgcacccccaccctccacttctcttcaggaagccaaggaggccctagaggcaaaggaacgctacatggaggagatggctgacactgctgatgccatcgagatggccactctggacaaggagatggctgaagaacgggctgagtcactacagcaggaggccgaggtgctgagggagcgtgtggaagagcttactactgacttggaaatcctcaaagctgagattgaagagaagggtaaggggccaggagctgccgggggccagatgatggggttggacccctgactgaaagtatgaatggtcttccccaggctcagatggtgccgcatccagttatcagctcaagcagcttgaggagcagaatgcccgcttaaaggatgccctagtgaggtagggtcctctcattgacaggctcactctcctgtctccagatctgtgagtgacttgatacctggtctttctcctcctctctcgccattttcccacagaatgcgggatctttcttcctcagagaagcaggagcacgtgaaactccagaagctcatggaaaagaagaaccaagagctggaagttgtgaggcaacagcgggagcgtctgcaggaggagctgagccaggcagagcgcaccattgatgagctcaaggagcaggtctgagcagcccaaccgcttgcccagagcactgtgaggctcgccttccgatgtctcctctgtcttggcacctttcagtccttctccttgtttgctctgtctgacacaggtagatgctgctctgggggctgaggagatggtagagacgctgacagaccggaacctggatctggaagagaaagtgcgcaaattgaaggagacggtgggggacttggtaagagaagagagactgctcacttacaaccttgatggagggtgtttggaagagacttgccgtgagaagggttgacgtgatccctgatctttgagtagggtgtgtactgagtgcacccaccctgactctgacttttctttgccccaactaccttgtggtctcccaggaagcaataaacgaaatgaacgatgaactgcaggagaatgcacgcgagacggaactggagctgcgggagcagctagatatggcaggtgcccaggtacgggacgcccagaagcgtgtggaagcggcccaggagacagtcgcagactatcagcagaccatcaagaagtaccgccagctgactgcccacctgcaggtgcctgcacacccactgctctctgcccacggtcgccctggggcttcccccgtgactcagctgtgtcttgtcgcccatccttgctcccaggacgtgaatcgggcactgacaaaccagcaggaagcgtctgtggagaggcagcagcagccacctccagagacttttgacttcaagatcaagtttgcagagactaaggctcatgctaaggtcaggaaagtgggtgagctggagaggggtgggtgttggagaccccagcctgggtgtggccgtgggctgatctgctgcggggttctggccttgaggttcctggagttgggagtgctttgtgcggtggtttggaagactggcctgggcctgtcctagaagcaggagacacattggaacgcggcatggaggtcaggagggtctccgcagcctagctgagagcccacccccctgtctcccacgcaggcaattgagatggagctgaggcagatggaggtggcccaggccaaccggcacatgtccctgctgacagccttcatgcccgacagcttccttcggccgggcggggaccacgactgcgtcctggtgctgctgctcatgcctcgactcatttgcaaggtgcggtctgtcggccactttcccagcagaggtctgctgagctggcaatgagccaggcactggggatgccaagcaaaggtggcagtcattgtcctgctctcagggtttatgatgtagtacagggatgcagaatcacagacagatgtgtgttacagatgacgttttatgaaggggagatgcaggatgtgaagtggaggtagtgtctgggggagagcacagctggggagctgatggagacagtgggctattactgaaggagtaccatctgaggtgagacccagaagatgactggaattcgtggggggatagctgtcaggatcacgctctagttggaaaggcagtgggagcagcagctttatggtgggaaggagctggtcccactggtcctggtgtcctgtcagcccgcatccaaatcttcatcagtaccagcggtcacatcaccctttgcccatgtgcggctccctgcccatctaagagctgtttgtgctttctctcccgtgtcttcatgccctccacatagttgctcagctctctatagtcctgagtctgtgttctccatcctctgctctgagccccgtctctggtgcttcttcccacaggcagagctaatccggaagcaggcccaggaaaagtttgaactaagtgagagctgttcagagcggccaggacttcgaggcgctgcaggggagcagctcagctttgctgctgggctggtgtattcactgagtttgctgcaggccacactccatcgttacgagcagtaagtgatccctggcctccacggcagggccatgggtcccagattggctggaagtgaggtcgccttgtagactctggcctcacagggccctcctctggtctccagtgccctctctcagtgtagtgtggacgtgtataagaaggtgggcagcctctaccctgagatgagtgcccacgaacgctccctggacttcctcattgagctgctgcacaaggatcagctggatgagactgtcaacgtagagcctctcaccaaggccatcaagtactaccaggtctggggcgagaattgaggcttagcacaggaggagggagggtttcttcccaggctgaaggtgtgaaactcttagatgaactcaccttaggatgcagctccttgagggttttggattctttcatacctctggagtcccttgatgactggggctcaaactgaagtttgggaagaatgctgtgttcctccaaggcctaaagactgttcatttgccatccctcctcagcatctatacagcatccaccttgctgaacaacctgaggacagtaccatgcagctggctgaccacattaaggtgaggtgtttgggccaatggttgagccccttatagaaatcagaaatgaaagacatcagatcacaccctcaaagggtgtcacataagactggaacagggtcactaaggccagatcagggaagctagagagctcacttatggatggggtcagcaaagggtggagacttcctttagagatgttaatgggggcagaagggccccgctggaggctgacagccacctgcttctgtcttcacagtttacccagagtgccctggactgcatgagtgtggaggtggggcggctgcgggccttcttgcaggtgagagcacaaccagatctgtcggagttcctcttccttcggagtccccacctccttgcccccggccctaattctgacttggcttcccgtctgtctcctgttctgagtagggtgggcaggaggcttcagatattgccctcctgctccgggacctggaaacttcatgcagtgatacccggcagttctgcaagaagatccggcggcggatgccagggacggatgcgcctgggatcccagctgcactggcctttggaccacaggtgtagggctgtgcagggggacgggaaggaaactgagcagaaccaggaggggcgcagtatgtcgagacctggatcccgtcggggggcaggaatggttctgaggtagctgggcgctgtggtattgagcccagagtgggctcctgactccggcccgttgcacaggtgtccgacacactcctcgactgcagaaagcacttgacgtgggtggtggcagtgctgcaggaggtggcagcagctgctgcccagctcattgccccactggcagagaacgagggactgcctgtggctgccctggaggagctggctttcaaagcaagcgagcaggtgggctgggttggctgggcagaaggtgatgggagagtcaggtggccagtgtggggttttcactactgcctttgacacctgcagatctacgggaccccctccagtaacccctatgagtgtctgcgccagtcatgcagcctcctcatcagcactatgaataagttggccacagccatgcaggagggagagtacgatgctgagcggccccctagcaaggtgggtagctccttggagggaactgcaggggccaggaggagcagggtttggggaactgctgctcagtgtgggagggcgggggggcagggatttggggaacaccttcctcttgcttaaaaggcaaggaggaagattttctgtttgactggatccctctgaaaggagagccttgataaccctgccctctgcccctcactctgtccattagcctcccccagttgagctgcgggctgcagctcttcgtgcagagatcatggatgctgaaggcctgggtttgaagcttgaggatcgagagacagttattaaagagctgaagaagtcactgaagatcaaggtgagaataggggaggctcaggatctgaaaggccaggaaatagggggcacagggaggcagtgagtgttgattataactgaggggttgaggactgaggggaagacgtggcacctgtgatcagtgggagttcttttggcagcttgctatctcatggtatgtcccaggtctcgggttgggggcggtcatgggaagtgtaaggcaactggacacgctccatcctcgtccagggggaagagctcagtgaggccaacgtgcggctgagcctcctggagaagaagctggacagtgctgccaaggatgcagatgagcgcattgagaaagtccagactcggctggaggagacccagacgctgctgcggaagaaggagaagtcaggcacctccccggcccctgttcactccaccctccctcctgcgagcagctccctgcctgctaacccaggccctctcagagtgagcccccccagggggacagaggccatctccttcccagctgacagcaccattgtctcatcccgatctgagcctcttctgcccctggctcctggccagcagggctgcccttaggacctgtcgggacagagaaatgggtgcggggccattggggaggggacactgcccaagcccaggttctctttcacagagagtttgaggagaccatggatgcacttcaggctgacatcgaccagctggaggcagagaaggcagagttaaagcagcgattgaacagccagtccaagcgcacgattgaggggctccgggggccccctccctcgggtattgccaccctggtctctggcattgctgggggtgagtgccgtggagcaggcagcaccagcccagaggagattgaatgtccccactcctgtccttggtctctgtttgacttttctcccctaccctgctccgcccacagctggatgttgagccaggaactcgcttgcccagtttcactctgtggcaactttcaccaagtttttacttcttctgaagatgtgtgcagagttcctttggccaaggtggggctgtggggcctcaccaaggcgtcagtgaaactcagaattccagtagctctccctcctgggtctgccgtctggcctttctgtccccaccctgtattccaggaggtcatcagcctgcagcagactggggcacctgctgtggtatccagtggtgcctggtgctgctcttgactcttcctctgtgggggcactgcattttctccagagttcacatcgcttcaccctacagtatggtcctctcttccagtgctgaattctcccacttccacttggggcttctgttctgacctttgcctgctctcttagtgtggtcagggctccttccctggagattttccagcttccaggcctagcctcccagtttcctgacaaggaggtggccactgctgtcttggttctcctctactatgtagtatggtttttgttcgctctttagtttcttacttccccttctcacctccagaagacaaactccttgaaatggaattaaatctgcaggatctctagaactcccctgctgtgcttgtcttgtcagttggcctcacctagggtcttgtcctcgtcaaagcccccgtcactggtgctgcttgactctgaaaagtcaccaagtatcttcttgtctttagactcctgtgagtcagacggttctgtgttcttggaatgggacagaattaccatattgtgtggttttagcgtaggctttttttttttttcagttgcactaggtctttgtgcgatagacgggctcctctagttgcggtgtgtaggttcagtagccttgcagcatgcgggatctttgttctttgacaaggaattaaacatgcatttcctgcactggaaggcggattctcaaccactggaccaccaagggaatcctagcataggctctttaaacaaatactggttcttttttttttttttttaataatttcacttattcatttattttcagctgtgctgggtctttgttgctgcacagactctctctagtgagcgggagctgcttgtcgttgcagtgcacaggcttctcgttgcagtggcttctcttgttgtgcagcatgggctctggggcacgtgggcgtcactggttgcaacacgggggctcagtagttgcattttgcaggctccagagcacagaccagttgttggggctcatgggcttagctgctctgcagcacatgggatctccccggaccagggatcgaacccatgtctcctgcattggcaggcggattctttgtcactgagccaccagggaagccccaaatatcagtttttaatttctaaaactttgcactaagaaagggtgacttttgtctcagagcaatagggaacatgaagaaacgggtatgtgtcttcatgctcagttaagttttgccggtggggagcactaagggtgcagacgtttcagggtctcaggagcggtccatctgcccttctgggagatggagtgtagggcagggacagcctcgtgcctcaagtgtttgctcaacgctcactgccactgccactcttcctcacatgttgcagcttgtatcgtggcctgactgccctttctatctttctttcacacatatttgctctttccccgaacataaaggcaggattttgttagagaaggtatggtgataaggaaaaatgttttcctgcatgaccaggattcttctggtgtgtccccctcaccaccataccatctaattcctctctcctcttttcctgctcccccatgggctgtcttgagtgcagaagaacaacaacgaggtagagagccaaccttctgggggtgttaacagggttggtgggaattggggcgtggggagcagggcgagactgccgccttgagagccatcaagactggaggtagcaggggataaggaagggggatgggtaggaatggaacccatcttcaacccttcccacctggcactcatgacatttgttgtggtccccataggaggtgcccctgggcaggctccagggtctgtgccaggcccagggctggtgaaggactcaccactgctgcttcagcagatctctgccatgaggctgcacatctcccagctccagcacgagaacagcaccctcaaggtgaggaggtcacagagagggtaagtgcctcactgatgatagacgctagggcgggctgtcacttcttaccaccactcttccctctttgttcacagggagcccagatgaaggcatccttagcagccctgccccctctgcacgtggccaaactctctctcccgccccacgagggccctggcagcgagcttgctgctggagcgctgtatcgtaagaccaaccagctgctggagacattgaatcagttgagcgcacgcacacacgtagtggacatcactcgctccaaccctggtatggacctacccactcctgagacgagaaccacagcccctgcccctgcctcagggatgtagtccccgcctaggcacttcccacaccagaaaggctcttcgtagccctgttctttggtctcagtgttcagtgtgcttgaggcaggcagctggactggatgacgggtcactagtcaagctgcctgcctgcgccttggcgggcctcactagccttctctccccacagctgccaagagcccgtcggcccagctcctggagcaggtgactcagctcaagtccctaagcgacaccattgagaagctcaaggttagtttagacctgcctttcctcacccaggaatgcacacttcagagcattctgtgctggaggccctagcgagcatggtcatttccaccaggacccccggggcccctaggggtccagccctgtactaggtgacacgttgcaaaggaggtgggagggaagacagggttcctgccttgggagttcactcccgaacagattctctcaatagaaaagagattcttagcagcaaaacgggttgagctaggatcatcttcagtgtagtgcagctctctgtcagagctgagatcactgcagagtagaatggttgagaatggcttcccagaagtaacagaatctgagatgaaccctgaaggttaagtatctataaagtaaggatgttgggtagggatgggattggagttgagagcaaaggtatggtgataaaagagaactgggtccctgtccttggtattagtattcctgtgaagccagggagatactgggctaacctgtggagggtcccctaaatgactcctgtttccccatctgccaggatgaggttcttaaggagactgtatctcagcgccctggagccacggtccccactgactttgccaccttcccttcatcagccttcctcagggtaagagggagcatggggagggggtgggcagtgaaggctcagatgagtccttgccctctcctccagaattcgaagaggcttctggaggtctcagatccaacgactgaatttcttaagtcatctggccatgtcttaacttggaagtaacttaacagtgcttgcaatgctttccgaaattccagtatttttagcagttaaacatcatctgtgatttctggcaccaggagagactcaaaactcccttgtcaggctatgtgcctcaattctgatttggaaagcgtggtcattatagcctaggagcctcaaagcccccgtctcccagggtctcgggtgctcagggaccttgtcagtggcacacagctcaagtgagcccctgacctggcggcttctgtcccttcccaattcccaggccaaggaagagcagcaggatgacactgtgtacatgggcaaagtgaccttctcgtgcgcggctggccttgggcagcgacaccggctggtgctcacccaggagcagctgcaccagctccacgaccgcctcatctcctaaatgcttcttccttcactgcctgctcctgcccgcagccctcctggagctgctcctcctgatgcctagccaccgggcagccccccgggaggactgcgtgtgtaagctgttcctgctccactcggctccacgcccaccttctgcgccctgccccggccccttgacccgggttcccgtttcccttccctggcctctgccagagttcactgttcagttgctcccttcctgaggagcttcaggggctctcgggggtaggtaggttgagaccccacaaccaaaggttgaatgagatctctccgactgaggacttcactccttgattaaagccacttctgcttcagtgttgtctgtgtgatgttgggagtgggaattgggccacttgacccagagcaggagtggaggagaaggggtgctgagaaggctctggctatgccgatttgaagatctccctctttcgtgaccagtggaatgctctgtccctcaaatttgtgtgcagttaagtt

SEQ ID NO: 161 - DNA, 14350 bp, Hippotragus leucophaeus
  source 1..14350: mol_type = genomic DNA
gactgaggattatgcaacatggtccaaccggagcggccagcatgaccagctgtccaggggctgcctcctgccttttcttttgtaaagacaagacccttgggagttttaattctgttttgtacttgccctgtggggcctccactgcttttctatgggagacactcttaatttaacagatgagaatattttgaaactctggctctgactctgtcctcattttttccttagtttttttgtaaaaacagattataatttaaatcctacttctgtggtagagagtgcttagactgtctgttacactgtgtatgtctctttcagtgctgcctcttccccaggaaacagcagaggccacacagagtacaacagcatttaatggtcagaaacagttgtacagtattacagtcagccacagaagctgtgctggaggacaggacccaatcctcccccacaccaggcaaagcagtattgggcaggagctggcatgtggctgggccatgtcctcatccctgtggcctaaggggagaccaccatttaatatccccagcttccactactcttcagaggagggggtgtaagccccacatgcaagaagcccttgcccccagtgtcaaatgggacgcaagagttacgattaaggggaaaccctgtgtaaggtattaatagagttcaaaggggtagggattacccctgtcctcaatcacccaaaggtgctcactttcccagcttcttcatccgttcatcaatgttggcaaagttcccctcaattgtggacaggttttcacgcatcgtcgtctgcacctagaaagcaagacagctgtttcagtctgtcaggttcaggtgcttacctgggtgaggccctgaagaaattctctgagagaagacgaagacgtgcaggagaattccctggtggtccagtggttaggactctgcactttgactgctggggcccaggttcagtccctggtgggggaactaagatcccacgagctgcacaacaaagccaaattagaaaaaaaaaaatggaaacagcttgtgggcccgagaatgggaaggtgacttggagcaccatggacctagcatgggatgtgctaaacaggcaggcctcttaagaattcctatcctgactttaaccagaacagttctttcatctgttttatgtactgagggacaaacaggattttgttgaagtaagggtttcactcgtctgaagttttaaaaaactgctctggaggaagaacctaccatgccaagcactttaatttattttggcagtcctgtgatgccagaatcccaactgtagtgcatcccccagcatcgagaacagtgcctctgccagaacctgaagacttgctctgtgctgggcactgcttagagaatggagaggtgatgctcacagctcagcatcagaaaggaaggggcaaaaccaggtgggagcctggctccagatttcaatgcccatgttctgtctagtgtgctgtgctcagcaacatctggttgaggacccagggaggataaaagccagctgagactacagagggaaaaggtaggttttataggaagaatggaggtttactgagctcttaccaattcactcatatcacttcatttaatccacataactctgaagtaggtatagtttgccagatggtgagatggaggttcataggttaaataagttgtcagatgtcccatggtaactaagaaacagtatggagactcaaccaaacccctgccacaccactgtgccaccaaatgggccaaggcagaaccctctggagctgaagctggagaaccttgcctgtgtgtgctggggaagggaggcactcacctgagtcaagagggtggcattgtccttgagggaacaagtaatcatctgctgcgtggtatccaagtgtgtcagaagctgaccaaactgcatggctgtgaaaggtcagaacaataggcatggcattagaatccaagaccagagggaagggaacaagagttgctcactttccattcctcttgacaccccttgtggctggcctcccaccttgttcatgcagctgcttgatggtgacaagtctctgtaccagctcaggaagggaggtggcaatggggctccagcgctgtatggtttcatacagctggtgcacctggagggacaacacagtggcaaacttcagccaaatacaccccattaggatgagacaagtgcaagctggggcaacaaggaagcactgccttatctcagctggtaagagcttatgaggacagtggccttaggattcagtgctctcatgctttgctcttcccagcaggaagagtacatgaaggaggaggaaagggtatgaagatgggaggaaagttctcttcctgaccttgctctgtgtatctgcatcctctacagaagctttatgcttggcaatctcattcacttttcccagcacactctgaaagcacagattttaaggttgacagtaaaggcatcaaggtcttccaaagtcactagctgcctgtaatccaatttgcctccacttaatacctgtaaccgagcctccacttggtccaaaactgcaaggtccagggcgcccaccttcgcctgcaatagctctacagtatcctgggggcggggtcaggacaagtgtcatgaagcagacagaatcagactagaaaaggacacctcatattccactgaaggtaatgaataaacagctacagatccaaaaacaattttctaagcaaacgcaatcctgatatcccctctgtcatccaaagactccagttccttttacactcaccatgaggcaggctccctgcagacctgctgaaaggggattctgatggggaaaagaagcaaagaagtcagtggttctcatctctccaggtgattaccaccttctcccatcctttctggttccagtaggcaactgctggctgctcctgtaactagaaactgttcctgactcctccctagattctgtggaatgctgtggaccttagggctcaggatgtgagggttggaacaagtataagagagcacctgacctgagcatcctgatcacagcgtacagtggcttccagctctgtcaggcgcttctcgagttctgccacctaggggaggaaagagggtagatttgccatccacctacttcccttctgctgcagtgggaggtaaaccttgctctttgctggtctgcttgccctcccctcccctctccccaccactctgccaagggatttctttctctggaacacagccctagtcacagtcttaaatgagacatcaagaggaatcaagcattcccagcaccctctccccagatgtgattccttggagggcagcaggaaagtctccggagccacgtcttccctggccccttaaccaacattacatgcatccacacacatacacaaacacacacaaaaacatactttggcagcttgagagaacttgtcctgctcaggccgagaatgcagttcataagtgaccaagctgctatctgggggagtcccactggtggtcttgccccctgaaccagtccctttgctgttttttgttgcttccagctgcagcagtaggcgcctggatcaaaaacccagcaatattatcatgacttgaaggatgtgggtcagcccagtcacttgtttctgcctcagggtcagcattaaagaacagctaggccacctctccccttcgcagccctgtcaatacctggctggagtccctctacaccccaattagcaatgatttcccagcaaagtctggcacccacttagccagagctccatcggggtcagtaaggttgattgcggcatctggtcccagcagcttctccagatgggaagcaaccagctgctgcttcagggtggccagctgtttagccaacaccacaggggtcagcttctcctcagtggctgcttccttcactgtcgtctggtatgaaaacaaatagacagtgaggggtgctaagagtgagtcaagagaaaaaagatcaagacccttaaagatagctgtgactaaaagtcactgggctgctcctcacccacttacagtactaactataaattcatgtgcattcccaaactctgaaaacctcagcccccttagggaggagcttagggaatccttctcctcccgttgggaggccttcctctgctatgtaagtcatagcagaagggcgagaggagtctagttaccttgattttttcaacttcagttgtcagctcttggacctcatgcagtagtctctggtacttttgctggggtgtctcctttactcccagaccctctccaagctagagagcaagcacagacggtgacatcacacctcctacaacagggaacctcaagaatgttatttaaaaacaaacaaacaagaatgtatccaaacccagtctgagtttgtaagagtatcatatccaaatccagtctgagtttgtaaggttattatacccaactaagaatccaccatcatcctcactcagaagacctgcagagagctggaggcctggggacactccatagccaatagcagggggacaaaacatcctcccctgcatccagctgggcttctgaggagccccaaccagagaggaacccagaatcccacctatatccctgctctgtcttaaatgcccactggataggatcgctgcactattcccatcaacacacaaacaacaaaccatctcatattctccagattcatatcccgttcttttggtttttccaattcgatctgagaaatctgccaagaaaagaagatggaattgagggcctgatcaagacccacggcagtcatgatctcagtgactgtgagggcttccataagacagctctttccccagagcaaatgtcagtgaggcctgaggtcaggcttccccatccaatttccaaccagtctcaccaagtccctttgtgcccactctcttgtctttgaacttgtcataggcagcattgggattgacaatgatgtgctccacactggtactcgtcagctcctcctgcagaaacaggtagttcaggccaggggcagattcattcccactctagaacttcccagagccccccaaatccccaaaccattaggagactgggctctactctccccaggggaaagaaggacagctccaatccaagctatcgacccaggttcaccctaggaaatgaaagcttcctgctaagtttggagtctcagttgtataaatattaacagcctgattcaactgggaacagaggcagcataacctccccacccattctgtacataagcctcctcatcccctccccttccccaatctaactgggccctcccagttatctggcaacacgatgcactcagggcaagaaaccaacctgacctcttttaacctccccctcccaaaagtaaatttccttgctgctgaggaagtccattttcaagctaacctcccatccttgctggagggaaagaggagcaatcaggctactagctcttgagtatcagaacttgcatgtgctgctaaagggaagataacagcttttagatacaaaagaagtttggcagaggacctggccagatgccatttccagactgccatgaagtcagggaattcaggggatagagagaagaggcagatactgtgttatatttaaagggacatcttagaagcaacagcataagctatacctggttgccaagaatacccatcagcaaaggccacaggtacattctgaaacagagatagccctgcttcttctcaaagagaagctgcagcactggcctcttctccctgaccctctgctgtttctcaagcactgaagctctttcataggagggggcgtggtaaacaaagttaaagaaacttcaccctagaaactgaggcagaaaggttccctccttactagtttatctgttagcggttcagagtctaataactacaccaaaaccaagtcctccagactgcatgtctctccttcaattgtcagcagtccaacagttctcatcatgcttctggaggaagtggaaggagacctggaaagcctttttcttggagtggacatcaccttctactggagaaaggcaaagaaagtcttctttcttttaaccagaacaatggttctcaaccctgcctgcataatcgaatcacttagaaaaggggtaggggagaaaagagggatgggctcacctccatagatctgattgaattgttctgaggtagggccagggtaggaggccagtttaaaagctacccaggtcattctaatatgtatccaggactgagactctctgtcagtgggtactaggggttgatggggcgcagggagaggttatgatggagagacatggagaaagcagcagacgcaagctccacccttcatctctgctctgctattactgaaggaatcagtgtgagtggcagatttataaacaagggaggaggcaggtaaggagaaaacatcaactgtgctttttacctcttcagggaagtgctgggcagaggggcaagagctaaaaaagattaaggggaaataaaaggtttcaaagtcccatatgaaagtgcctatgggaaaaaacaactgagtcacaaattctctcaatcttctctgtagtgttatggccagagcacccactggtcaagtaactgtggtctcaggcctctaaaaagtgtgtgtctgagatggattcatgttcaggaaagaacattaccctctttcaagttcaccctcaagaataagaatatgccactcctccctctgacaatgaggtagggaaaagggaaaaaaacctctttagaaggcacagtctacagactaaggaaagcaatcacagctaccgttttgttaagcacttactacggcccaggcactacacagatgagaacatactttcttatttagttttctaaagagggaatgtgtggagtaaaaaagggtcaccactagagtgtgagtgtcggagcttctggacatagcagggacggtcagtaatttcatcttactagtcctgctgcaggagcacgtcctggggcagaagggctacccagcgctggcaccctcccggagcctctctgagggtgtggctccggaggctcaggtggacagcacacttgagcccttcagaggcactgactctgccttggaggtctgccttggagtgtcttggaggtctgggggcatgggctagaggtagtgtcattacggtgattcatgagatgggaaaaggtcagctggggttggggctgaatagcggaacagaagatttagtagagacaaaaggacagagaacaactgtccatcatagcacaccccgttaaaaagcagatgaaaggtaaggcttcttaccagctccttgtggtttccccagaggtgagaaaatcaaaagagttaaaggaaagggatggggaaatgggggtgagggagggaaaaaaaaaaagacaaaattgttattagcaaattgtcacatgcactacacgacagtcttcaaatatactgcatctcagggcccaggggagcctagcaaaatttggggcctagccaagaaatttcagctggggtcactgcataccccaagagaaagaagagcttgggaccctgtcctctctggtggtcaggatgtcatgatgctttgccgtgaacagcagcaattcaggatcacctgggaactaagggttaggtgttgcaagccagtggcacggaagaaagtgggggcaaagaaggctcggggaggcagggagaagctgtagaaacggcagaatgtgaagcagaggctgtggagataagagtctgagggcttgtagctgattgagggtccatgattctcaagggaagtaattcatggctcaagtcttcctgtctctcggtttctctaattttgaagaattaggcatttgaatggcagaatcaatcataatgcgggtgcttatgtaggtggtttcatgtgactttgtgttaagcagaacaaagtgaactttctagattatagatggtaagttcaatgaaatgcaaagtacctaactgcaggcccatcctcattcagtcgccagaggagaggcagggcaaatcctggtcccttgtgtagtctggtgtgtttgtatccatcttgagtgcttggaaactcaccctacactctgagggatccagagcaactctgccatgatgtgctagcacacagtccaaaagacacccagattcacagctaccagacatgtgcagaacatatttcttcaacccactgttcacaggggttggagggtatacaatggggaaaagtaagagtctttcaaaaagaggccttattttagcccaagccacacagataaggctccacttccagcaagactggttaaagaattgccagggaaggacggatatatgtgtatgaaaagacatgatgggataaaaacaactacattctgccccagagatttcagctagatgcatcagaacttcaacctctagcccagccaagactcctctctcagttcagggcagaggtggatccaggtcctgtggtctaaggctgggatatctctgcagaatcactttacccttctcttgcctcaccaagctaaagccagcttgattaaaaactcaagggaaaagagaggacaatcggccataagttcaagtccaagtcatgaggaatgggggaggacagaaaaatttaaaaaggaaaagtggtatatgcatatcaatttgtaaatcatacataccacctccaagtctgacctacggttgggttgggaaatgagatttttgggataacgtctgtaacctggagtagtaacaatctctatgggagcctactacacccagccaacttgattagaattctaagtgccttgatcccaggtacatgactccccagtccctctcattaataatctcccagactccccagggctgtttggctaagtggctgtgcctcagagggcaagacctgaggttctagatcagaaacaggaagaggtcactgccgctcgctcccttagcctgtttaggctctttgccaacaccacagccagggggacttcagtaccatgaggacaaggaagatggatagtgctgtagaataaaactgtccaggatggaccaacacagtgctgaccatccaaccatttctaaaggaggggtacagaaacaggaagacttgtggaagcacaaaaaaatccaagttagtcccttaaaatgcatataacatccctttcctagcccatttacttcctctaaaaccttagcataagagaatattaagatgaagttttcatcttaatcaggtataatccacacactgctaagaagtgaggactgctgctgtccccccgttcttaacccttgtccagaatggctaaaagtcattccttttctcttaactccatttcagtttgtggaggagaaaggcaacccccttccaactcctgctcttaaattcctcacgtccagaagtgttcctagtttccatgcttctatcccatcctccactggacagttttattctgcagacgtcacaaggggaagacacaatgatgcatgaatcatagttgtgtttctaaaccttgattaagaatctttaaccatgaggccagcagggcccttagtaacccggctagagatgcattagaatttaaaacaattagctgcgacaacagcacagtgagagcattgcatgcgagatggcaaatgaaaaaaaaacatgcagaggaagaagcattgaatggtcttacttgtgcaaactagtgtccaggcaaggtggtgaggagggaggatgggggaagcattaggaaaaactcaggtaagttccagtgcgccaacagtcaatgaacacaatcaagcatactctgtgatatcccaaactgtaaggaagagaacttactatttcccatctcaggctggtggagggtctggtatcatttaccctttggagaactgaaggccctgccagggccccaccaagctaaggctaggtcattttcccccttccacatggcatcaggataggcatggcatagagggaggaactaatcctgtttctagcgagtttctaaacttactcccccttgctccagcacttcaaaagtggggagaagaatgcctatacagacccaagcgtaggctgtgggctcagtggggagggaattccagctgagaattagctttcctgacaagacattttaagaaaagtttccaaaaagctcatggcccaaatcaacccaggagtgtctgatatgcagaggggatcctcctacaccgaggaggaaagggctagcctgtgtggttttctggcccattcactttagaatattttagctcctgctaaatttgttttaaagggatagcagaaaaatcaggaccatttttacctaaaataaaaccttctactatttcctcttccatccttcccactatgggaattgcaaacttttccgtttaagttaaactagcaattacaatcttttgggtgtattacggggtattatttccttcggcagcccgatttcttccatagcggagcaattgaaggaagaaggtgaaaagacagggaaggtcgtcaataacctttgattacttctttagataaaaatctggagaccgccctgaaaggttccattaagaagttgaccaaattggttgtctccagggaggaactgaccattggcaggcagcagtgggaagagacactttttgttctatgtacatatattacctactttaaaaactaataaaattaaagttccaaataatctggagactaaggcagagcatgctcttgctggagttaagaaggtgactgaaacctcatggttcagccacaatagtggtggtgtgcagtgtgacccatgctgggtcttgggaaggtaagtgagaaggggaccagctgctagtgagaatccaggcctcaaggaaatgaggatgctggattgtctaagtacaaccaactgctcctcaagttgcacacttacgtcagtatcaagggcagtggcagaaccattagtcagctgacttcccaaaagctgcgctcgtaaggcccacagggacatgcaggggccagagacattagctgccatcagggaacgtctcaggcctcccccactcccgccagggctcctgaagtagctgagagtctcccgaccctactcactcctccccagtgacagtgtcattctgctgacccttaggtgatggaggcaacttagctcctcttgtgtttaccatccagttcttatctacttctacactggtattctggctacatgctgcaggaaatgaacatcagcccatcagacaccttgccagatgctactaaaacaggatgctcaggttcagcagggagaaacagccaatcagggcagaagagtcaggttcttccatgcctgggatgaaggtcatgctctttttattaagagatagcccatgatttcaaatggaaaattacaatttattttttggtttggaaaggggactgctatgatattacctgtttgatcatggtcagtgacaaagggacaaaggtccattcattatttcaccatgaaggcttgatattttataggcagagccctaggctacagctgaacagtctctgaactatggtagcagaatggagtcctcagtatatatactcctgccctttgagtcagagatagcttcctaataagatacctcttagagtgaaggtgcaaacttaggtcctgagcaatgacaccacctgcattatttccagatattcaagtttgggggacagactgacatgccagcaagtacagaagcaacaagaacacaccactcagagaggggataaagaaggtgttccccacaaagaaggaaccacttctacacgggggaatcaaataaggaataagtgagtacgccaagccatacattataagccagcaaccagcattctccagaactaaccagccccacagacgtagccacaggactcacagacacacatacagagcctgtttccactgactcttagtcagcacttttttgagatctcataccatcaatgtgaccctagcccagctctccttgcaaattatagaacctaaaatacatcctataagacatgtgaacagatctttgctccccttggcacttacactcagggtttccactatgttcacttcattcactcagttttttctttcatgtttcctatatgtatcctaactccctcattagtctgggggacttttgagggaagggacatttttccctctgtactgcacaaaaatcaacacaaaatgaacacattcaataaacaatgctaagtggtttcccttatggttaaaatgtgtccatagctaattccttcctcttgagttcttcctgaatctgaaagtgctatcaagtcctctcctctgctgatatgaaatatttatgttcttcttcaaattccttctgctctgactagctctcttatctttctgaagtctccaattcattttccttgcctagtggattctggatactcacgtaaaatcacgtatagtattcctctatacttcaaagtctagcttgttaggatgttaatgaacattgagtgagagatatattttatgaaatagaaggtctaggtcttaaactcatgcactttttaagtgcgcaggcttcatgacgcattaccatggactagcactaccagggctaagtcactagcacccagcccgttttgaaatatttcaattttatttaaaaggcctaagtatcaggcctcttagttttaattccactgacctgactctccttcctggcattgctcatttgcaagtcctacaacctacgtaccacccaggctgggttggcatacccgcttattgttgtggctcgccagaaaagggaaagggcctgcctgggagagagatcagaatccacaggagtcctgaggcaccacatagtcttaccgcatcaaactctgcttgatcatcctcaggcaggtcgcttgtttcataaacatctggctcgttcctggcctgcaggtagaagcagtgaccatccaacctcactacccagtactacccagcaacacccctgaccccactccatttgaacaagttaacagagaagtcaggctgtgatgccaggattctgccccttctttcacctgccaggtgaactgcatgtcatttcccatgtcttaacggggggggggggggggggatataacagtggagatgactgatggtaaatggtgagtgttaagtgatgacaaagatgttgccctgaatctgaagaatgacgggtcctgggcaatcagaagtaggagaggagccatcattaggccctgcacacactaccctggcacaagggctgagagtgactcaggaccttagtacacaaggtcctattccaaccccccaccccgtgaatgcaagtaaggcaacacaaagggaggtacattccggcatgtgcggggcttgggaaggaggttccctagaggacaagagttctctatctggggttctgtcacggtaacctcctcactctgcagagtgaaggccatcaccaaatggcctggtttgtgtgtctgaggtgggggtgaggggcttatgggactatctggggagacacgggaggtgtagacacggatggtaataagcactagagaccatttccgggccgagaaaccggcgactgccggaaaggggccttgtaggccttcgcatagcccagcccagtcgggtcggagtccgaaaggtgctggggccggtcagggagctagaggcaggagccctcggggctgaagaggggtgcaggcgggaaaggtcacgggttggtgtctgttaggggtctttaggaggttgggggcgcggtcttggggagccagagccggccgtgtactcacaatgccgggaaggtcggcgtacttagggtccgccatggcggcggcgaggcagggttgggggaccggggcctcggcagagccggggccggtgctcgggtaggggagaggatgggtcctggtccgcgttaaggcggccgcaaagggagcggcggaggaggcggaggagcaggaagtctcgcgacaggagtagtacaggggaagggtgaagcaaaagtcgcgagaacagcccgctaccacacccctggagaggcagggattggcgagaacgaggccgggaatgaggtaatggcaggaaaccgccgcctaggattgtgggatatgcagtcttggcccacccagcttgggcggggaccgacgttaacgcgctttggcagctgtgtcacataacttattttctttcgtctttatagcgagtctgtgaaagagcttttacaattcctgtttttcggtggataaatttatttttcagtcgctaactcctgtctgctgctaagtcgcttcagtcgtatccgactctgtgcgaccccacagacggc

SEQ ID NO: 162 - DNA, 190209 bp, Hippotragus leucophaeus
  source 1..190209: mol_type = genomic DNA
gctgcaagaacacggacccagccatcccgggcggcagagcacagccccctcggccaagcctaacttccatttcctttccttcctttttgggagagctaggctccccccacgcgctcggttatcttattttcctgagcctcgccaggtcgctggcctctctctgcgtccttctgatcatgtggaccccgcggcagccgtgcagtcacggccggcggctgggtccctccacgccccattcttcctcttggctcccgcgggccggagctgcgttctgaagaccgggttcccgcggcgattgacgcgctgggggaggagcggtttcttgctgcgcgcctctcaggagcattacggctgggctcgttcccggctccggccgccagccccagcctcccgggtccggagcgaggactggaggaggcggcgagggagggagcgcgagcgaggaggcacgcgcccgcctgcccgtccgcgcccagagcgctgccgccgccttagcagccatggccgagcgtcgcgccttcgcccagaagatcagcaggtaaatctggggcatgtggcgcgccgcggcagtcggaggaagagcccgagagtcctcccgggcccggcctaggaggcgggtgggtgtggcgacgggggcgccgggatcccgcggcctggtcggctgctgggcggaggggccaaggggactcgccggggctgccgaggcctcgcgcggcgctcctgcctcggccctcagccctcgcctaccccgggggcgcagagagccccgcgcgcacgcctccgccggctcctcggccgcccgggcctggagtttggcggcggcttattgaaaggcaggcggggtaagctcggcggctggccgctccgcgcttcccgaattctttgtgtccccacccccaggctggccggggccctttccctctctccgcccaccctcggctctccccaggagggtgcggggggtccgccctcgtctccaccccaacaaaaggttcggtgcgcgacggactcccggcggaggagggaggccgcccctccttaacgccccttcacccttcccagaaatctgacacgaatcctctttgcacccgggggtcttgttcagagtgggcgcgtgcacccagaatggaaaacgtacggccagaataaaaagttgagaacctgtgctttgcaccttcggtgtgcagctgcaggatccgccggattgtacgctggagcttgatcctgctagcgtgtgaatgtaaattaccctgtgtttctcgtagctccggagaaagatggatgataggcagtgttctttatacgccggccctttgactcgtgttttaggagtctaggcgtaaaaagtaaacgatcaaggctgagttttcttttacctacttgtggtgagaatgttgccgcttttctcccctctaaaactaaaaattgaattacggtggaggatcctaatatttgtagactttgtgaaatatacgaatgtatacgacactagacattctgttaattatgaagtctcaagaaaagaaacattcgaatatattactttttcgacaattctatttccttgactctggatctttttagtttactgttatttaagatttttttttttgcctgccaaacaggtcttttcttaactatctgaacttccatagtgttactctattttggttacgtttttcatttaaaactaacgtctctttaagctttgtgcttttttttttttctttcgaactttagaacatatttcatttcctcaggaggcaaaatagcaaatgcttaagagcatagaggctcagtctatgacatgggctgaaatcctgattgttactttctaagttaacaccttggccaaattgattaagttctcttaagctttagttttaagctggtctggataatgggtaaaaacaaatcaaaaacgtgtacccagctcatagacttgttgtaaacattgtggataatttgtgtaaaggttttagtatggtgtatagctcctgctagctatcactgaacccttaaaataagtagtataatctagggagctgtgatagacttaataggaatttattacttaataggaaattattacttttgttctttttttgtaaaataatttgatcttgtttctgaaggtagtgccatttaaaaatagatatattacttgacatgcatgctaagtattaatttctcttaaatagagccaaaagcttatctctgagaacactgtgctgatcaggaaagtgcacattagggagttaggtatgaaatgtatacaatgtctggtctccagtcatgggatttgtcctcagatagatatgacaaaacacaagaaaaaaagataaccagttttgcaaaacaacagaaaattcaaattaacattaccttgtaaagttataaaagtacatgaggcaatagaaatgaagatacatgaattgactggagagatattcagacgtaggcatgcagtgattgatgattgtttggatatggaaggtgaggaagactgaagagtctgggaggacatccaagtttctgatttgagcatctgggttagaggcaattgttgaggtaagggagtgcaggagggggaaggggcctgagagtgggaagtgtggtgtactggagatgttaatttagttttgtacttgttagttttgaagtgctgtggagcactcaaagcgaaatgtctgtgaggctgttggtacaggtttaaggtgcagaagagagattgagttgaaggtctagatttgggagtaatcagcaagtagactgtagttaaagcagaggaggaggtgagatagttcaggaggaatgctcggacttaatttggagggaagaccaaggacagaacagcttatctggtcattgtgaatgaaaggtactttcttcctaggaaaacacggctgaataaattcctgttctgcttcttaatttcctaccatgggaagtatagtacagtttgaaaacaaactgcctggtttgacatcctagcactgcccctcatagagtaaacttgggcaagttatttccccacagttttacctcattttccctatctataaaatggagttaatggtatatggactcaccttataggatggttgtaagagttgaataaattcgtacccgtgaagtgcttataagtgcttttttgataatgagtgcccagtaagtatcactttttaaaaattatgggatttatagaatggcttaggaccatttcttgaaagtaataatcctttttatgatgtacctgtatgaactttgttgctctgtgagaagcctgttgctatctgaaaacttacttttctttttcaaaggtttatggttttttaaaaacctttactttaaaaagaattatactggtctctttcctggctcagttatttcctagccctttgcttttagtgcttttgttttttgaggctgtgattggtgatttcttgaagctctttattctgtatcactgattgcactgctaacctcagctcatcatagaaaagcagacttcatgtcaagtactgcctcttgtctgttctccccgcttttggagaacaagacaaacgctttgttaacctttgtaatcactccctcgtatataatgagcttcccaggtggctcagttggaaaaaatccacctgccagtgcaggagatgtggattcagtccctggtccaggaagatttcatggagaaagaaatggcaactcaactccagtactcttgcctggagaaccccttggacagaggagcccggcgggctacagttgatagggtcgcaaagagtcggacatgatttagggactgaacaacagcaatgtataatgggtgcaatttatggaatgttgtttgtagataaatgatctaggactttgtttggattattttgtcctgtcacttgatattcagctgtaatgataaacatttgtgtatacttaaaacactttttaccacgttctcatcttcataacccagaaggcagaagaacacagaacagaatgtaggctctaggtcacatcctcaggttgaaattctgcttttacgaataatagctgtgtaattctgggcagttgacctaacctttgtcttggtttgcttatcagtaaagtggagctagaaatctctataaggttaatttgaggattaattgagataatacatgtaaaacacaaacctgtgcctgaaacatagcatttaaaaatattagctgctgctattattcctatattatttagcattcgtataatctagatgcagaactgaggcctactaggagaatgagattatttgtcttatttgaggctcaaatcctagttctatgattgcagatgttcagttcagttcagttgctcagtcgtgtccgactctttgcaaccccatgaatcgcagcacgccaggcctccttgtctatcaccaactcccggagttcactcagactcacgtccattgagtcagtgatgccatccagccatctcatcctcggtcgtccccttctcctcctgcccccaatccctcccagcatcagagtcttttccaatgagtcaactcttcgcatgaggtggccaaagtactggagtttcagctttagcatcattccttccaaagaagtcccagggctgacctcctttagaatggactggttagatctccttgcagtccaagggactctcaagagtcttctccaacaccacagttcaaaagcatcaattcttcagcgctcagctttcttcacagtccagctctcacctccatacataactactggaaaaaccatagctttgactagacggaccttagtcagcaaagtaatatctctgcttttgaatatactatctaggttgataccatctgcagtgattttggagcccaaaaaataaagtctgacactgtttccactgtttccccatctatttcccatgaagttttgggaccagatgccatgatcttcgttttctgatgttgagctttaagccaactttttcactctcctctttcactttcatcaagaggctttttagttcctcttcactttctgccataagggtgatgtcatctgcatatcggaggttattgagctttctccctgcaatcttgattccagcttgtgtttcttccagtccagtgtttctcatgatgtactctgcatataagttaaataagcagggtgacaatatacagccttgacgtactccttttcctatttggaaccagtcgttgttctgtgtccagttctaactgttgcttcctgacctgcatacaggtttctcaagaggcaggtcaggtggtctggtattcccatctctttcagaattttccacagtttcttgtgatccacacagtcaaagactttggcatagtcaataaagcagaaatagatgtttttctggaactctcttgctttttccatgatccagcggatgttggcaatttgatctctggttcctctgccttttctaaaaccagcttgaacatcaggaagttcacagttcaagtattgctgaagcctggcttggagaattttgagcattactttactagcatgtgagatgagtgcaattgtgcggtagtttgagcattctttggcattgcctttctttgggattggaatgaaaactgaccttttccagtcctgtggttaaacccttactatttgtattttctttctgcaagatattttctgtagtagttctagattttctaacagtgctgctattagtatccccaaagttacccttgctttcttaatctttgttaatttggtatcattttgctgcccaagaagcagaatttaatgaaagatttcatcagatctttatttctgaggaaaatcttacgtgagtaggattttctggatataagcttatttataacctcagtttttttttagtcttgaatctgttcataaccctggctggatagccccaatcttttaatgtactttgttcaattcattttgtcactcctgatcaaagtagatcatttccacatagtatcaactgtttcagtgctgcctgtttcattactttagacacatataccacctccctgaccttctgttgtgctcatctccctaaatgttaatggtgaatatctaacctctttcttgctcctgagctgcagagtagtgttagaaggggactagagtagtccagagttgatcttttattaattaatgtcttctcatttgaaatgaggtttattccaaataatttctcttatttactatctttgtttacctactccatcttttactgaaaattttgggactatatcacatggtgctgtgctgtgctaagtcgcctcagttgtgtgaccccatggactgtagccctctaggctcctctgtccatggaattctccaggcaagaatacaaaagtgggttgccatgccctcctcaggggagcttcctgacctaggaattgaacctgcgtcttttatatctcctatgttggcaggcagattatttaccgttagcatatgggaagccgccataccacgtgagtccttcattttaacctggacacatgactgtcccagtatgtcgttcagccgtccttctcgaacccgaaaggtgtcttgtctctaaaacttacctattttattgtattttgaagcctgtatcttggcacctactcccaactttgatctcacaattttccctttcctttgtagcatcttcagtctgttctttttcatggatgtttcccttaagccatgagacttatcatgcctttctcatcataaaacaagaactgttgcgtcttctggcatttctagctgccaaccaatcattcctttttcttttatagtcacctttctcacatgtatgtggtatagtgacgactacttcctgcttgttctccttctcatcaatcttgtagcaatatggcagtgcttaccatgctaccttatgtgtacttgaattgtagacctcttgagaattaggagtggttgacttttttcttttgttcatcactgatttcaagtgctgcagttttttatttatttatttttaaatgtctcatgcttgctctcctttttccgttccccttcttttctactgctttcagagctctttgaggactggcctaggtctttttgggcttcccaggtggcacagtggtaaagaatctgcctagcagtgcaggagacgccagtttgatcccagggttgggaaaatcccctggagtagaaattggcaacctattccagtacttttgcctggaaaatcccatggatagaggagcctggtggctccatggtgtctgcactcctgtacagtccattgggttgcaaaagcgttgagcacaatttagcaactacacgtcaataatccctccttatcctgaactcacccacactgatggatcttcaaaagtataggtgaggaactcctttcttacttcaccatctaatcttttttttttttttttttaaccatctaatctttataattccatggacagaggaacctggcaagccacagtccaggtggttgcaaagagttggacataactgagcacacacacactaggtctttttatctccagtgcttagcacataatcttgtgtaaactggacatctaaaaagtgtatgagtgaataccaccctgccacctgaatcatctttcataacttcacttacagataaccacaataagtttgtagcttatctagtccctccctcctctattacaaatgtgtttcaaatgaattctccctaaaacacagcttttatcatagcatgctgctgctgctgctaagtcacttcagttgtgtccgactctgtgcgaccccatagacggcctcctaccaggctcctctgtccctgggtttctccaggcaagaacactggagtgggttgccatttccttctccagtgcatgaaaatgaaaagtgaaagtgaagttgctcagtcgtatccgactcctagtgaccccatggactgcagcctaccaggctcctctgtccatgggattttccaggcaagagtaatggaatggggtgccattgccttttccttatcatggcatacttatgttcaataatgtatacgtagtgacttcttatggggttaaatccaaacccctgcttgcattttaaaagtcatctataatctggtctttctcttgttgcttattcttgagtttacattttggactagtcaatctggtgttttcactttacccccacaatgctctgctcatttccatctctataacagttcctgttgtttttgatatatgctgccttttctcttttaaatcttaccctttggttcagagtactccaagctgctgtcctgacatttgggataaccatttccttgcttttctttatttttaccgcctacgaatgcatccataggagaaggcagtggcatccataagtaatttaatttagaaaatttttgaattcatttaaatagaatcatactgtatgtttgtatgctgttctatcttttgctcaaaattgtatctgtgagattcagccatgatgttacaggcagttgaagttcattcattttcattgcttaatattttccattgtataaacataaccacagttttccattctacagtagatggacatttgggttgtttccatttttttaaaaaattattttacaaatacaccaaaatcatgcaacgctgccagcagtggatgcagttctgggccacaagtctgcacattcctttgcaactggtcctgtgatggcagaacctttcatctcgcctttgttgtttactgtgacccccgcattatcttcaaaataaagaaacacaacatcttttctccagtatgagtttcattgtcaaattaccactgctggatgttccttctttctgagctctggtttgcctttcttgactgtggccatcaccatgtcacccacaccagcagcaggaagtctattcaatcgtcccttgatccccttcacagagatgatatacagatttttggctccagcacagttgatcacggctccaaccgggagacccaagaaatccggaattttgcaccagaggacccaccacgtcctcgcttcaacatcctgaaggccggaaagggacaaaaaggactgtttccaatttttgactattagaaacaatgctgctatgagcattcctacacgtatattctggtacatatgttcatgagtttttctagggtatactcaggtgtggagttgctgggtcttgattgcttgttgtagcaattttatttatcatcaaatttgttaggcaatgccaaattttttaaagatagatgtacaaatttacactcccacatgttgctttacatagttaccatcacttggttttgctaactttctaatttttgccagtctgatggatgcatgctgctatcttattgtaaaagttttaacgcatatttatttgattactaatgagattgagccctgtttttgtatgtttattgaccatttgcatttactcttttgtaaattacctaattaagtagtttgccattttctttctttgtttcttccctttgggttctttttcttattgatttttgtgagtaccttacatatattcagtagattagttatttattgattttacattttgcaactatcttcatacactatggtttgtttttaatccttttactggaaccttttgaaaactaagctttaatgcagtataacagggttttttttaatgtatagtacttttggggtcttatttaagaaatattttattaccctgaggtcattcatatatcatatatttatcataaactttgtaattacctcctttgtatttaggtttatattccacctggacttgatatgtgtatggagtgaaaattttatttttttcagaatggattctcctttcgccattgatctgtcctgccatctctataaatatgtgtgtgtccttatttgtgggtcttttttatggactctattttgttccattgatttggttatacatcttttcattaattataaacagttttcattataataagctttggaatttggtaggataactctttccaccttaaaaaagtgtcctagctgctcttcagttcagttcagttcagttcagttcagttgctcagtcgtgtccgactctttgcaaccccatgaatcgcttcacgccaggcctccctgtctatcaccaactcccggagttcactcagactcacgtccatcgagtcagtgatgccatccaaccatctcatcctctgtggtccccttctcctcctgcccccaatccctcccagcatcagagtcttttccaatgagtcaactcttcgcatgaggtggccaaagtactggaggtttagctttagcatcagtccttccaaagaacacccagggctgatctccttcagagtggactggttggatctccttgcagcccaagggattctcaagagtcttctccaacaccacagttcaaaagcatcaattcttcggcgctctgccttcttcacagtccaactctcacatccacacatgaccactggaaaaaccatagccttgactagacagacctttgttggcaaagtaatgtctctgcttttcaatagctgctcttagctttttgaatttctgtatatattttagaatctaccaaaaacaaacaaaacctcccaaatctttggtgacctaaacgggaaggaaatccagggaagaagggttatatgtgtatgtgtggctgattcactttgctgtacaacagaaactgagataaattgtaaagcaactatattttataccatctacaaaatggcaacccactttgtattttattttttttaaaacaaatttttttaatcaatatttaataatgatccttgattctttgaaatgggcacaggcttttcaactctggatggtcctcaggtcctccaaaaaacaaaacaaaacaccaccgccccaaatgaaaaacggccaagtccttttagaatttgattggtattgctttgaatctatgtatcagtttgtggaagaaatgatatttttatgttactgactttccaattcatgattgtggggcgtgtctccatttatttaggtctttatatcacacaatgagggcttccctagtgactcagacagtaaagcatctgtttgcagtgcaggagacctgggttcgatccctgggttgggaagatcccctggagaatgaaatggcagccccctccagtattcttgcctggaaaatcccatggaccatggagcctggtaggctactgtccatggggttgcaaagagtcgaactgagcgactttcactttcactttttatcacacaatgaaattttatagttctctctgcaaggttttgcatatcttttttagatttatttttaggtatgtatcagtgataaaccttgctgggcttcccaggtgactcagtggtatagaatccgcctaccagtgcagaagacatgggttcagtccctgggttgagaagataccctggagaaagaaatggcaacccactccaatattcttgcctagaaaatcccatggacagaggagcttagggggctatagtccatggggtcacaaaagagtcaggcatgactcagtgactaataaataatatcttgctaaactcttgttaaatctaaaaatgtgtattcctttgtattttctttttcttttatgagacaggatgctcaggactggtgcactgggatgaccctgagggatgggatggggagggaggtgggagggagggatggggaacacatgtacacccatggctgattcatgtgaatgtatggcaaaaaccaccacaatattgaaaagtaattagcctccaattaaaataaattaaaaaaaaagaaaaaatatagacctaggtacagtgatgggtagccttgccctccaggtttgttatatcaaattaattttgcacaaaggaattggttttaaggggcagaatgtactgacaatttgtagttttacttagttatagacattggttgctattttacactgataatgtctgctccagttttttacttttagtctgtatcttttgttttgcttcttgtttatactttttctttacaattaaaaaatgaaagcataccttgaagaaaataatacaataataatgaaaataattatactctttactcaggaaaaaaattgttttaattgaaatttaataataatccttgattctttaaaatgggcacaggctcttcaactctggatcgtcctcaagctgttatacaacagcattgtgggactgattcaaccagaactgttatactttctccggaaaacacagggtcagtctttttcaggaggcttaatattccaacttcgtacttgataaacctctgttacaggacagactaaagctgaaggggaagattaggctgcagtcaacctacttactgccctgtggctttgtttattctatgtacatagctgtatcatatgaaaatcagggattttgttgtatctttttgaaacttgtagctggtttatttttttgtgttgatctgcatattattaccttgtattactgtatagatttttaatatcatttctattcaacattgtattaatattgagtgtctttgccgacaaactctgccgacaaaggtccatatagtcaaagctatggtttttccagttgtcatgtacagatgtgagagttagaccataaagaaagctgagcactgaagaattgaggcttttgaattgtggtgctagagaagactcttaagagtcccctgtacttcagggagatcaaactaatcaattgtaaagggaatcagtcctgaatattcattggaaggactgatgctgaagctgaagctccaatactttggccacctgatgtgaagagctgactcattggaaaagaccctgatgctgaaggcaaaaggaaaagggggcagcagaggataagatggttagatagcataaccaactcaatggaatgaatctgaacaaactctggaagatggtgaagaacaggagagcctggtatgttgcagtctatggggttgcaaagaattggatacaacttagcaactgaacaacaacatcctcagtttgtttataatctcaaaatgttttcacttagtattaagccttatggttattgtaggtttttgtagatctctttcggtttgggttccctagaaaacagatgctgagacaaagataaagagttgagactttctgggaggcataatcctagagcattagaagagaaaagggaagtgaagcagagaaagatgggaaacaatgtaaggtaatatcttatctccttggccactgcttcacaaagagctaggaggagattgtttggcacgtgtgcttgctaggccatacaggatatcactggacagcagaatagttcctcagatctgcagatggggctctgaaagaagaggaaattcatctgcctgcttttctcctgaattttcctaactcagagttagttccctttcctttctgggttgcatcttttggacccctttgtcaaccactcgagatgtcccacgactttttcagtggccttttatagaagagacttcttggtttcaggtgacagaacctcaaagcagattcacttgcacgtacaaaaagttgctgactaatgtaactgagtatgtttggtccagtgatgttcatataggcttcttatcttcttgtcttggctagattttcccatagagttgtaacaaaagggttacagtggaattgacagtcccaggctctaatcctgcaagtgcagttgtggcagaaaaggtttaggaactcagttattggtctggcttggaccacattactataatccttccttgaaccaattattatatttagggatgcaggggactctgaccagtcctgggtagtatgtcctctatggcttgggggacagatatgatggtgtcagcaacactcaacctcaaaaaatgagttccttatcaaaaaggagtttataaccaaaagaaggaggatcagagagctggtccccaaaacaactgatactctttgaaactagtcatttgaagttgtgtagcatcactataatcatttaaatatatagctgtatagtcagctcgactacctgctaaaatttaaaagtaactggtgaagtacaaaaagaaaaccagggtaacctgatgccagctgtggatcccatctcttaactttaagtttagttctcaccttaatgccaactctgggctttcctggtggctcagctggtagagaatcttcctgcaatgctgaagacctgggtttgatccctgggttgggaagatcctctggagaagggaacagctacccacttcagtattctggcctggagaattccatggattagtccatagggtcgcaaagagtcagacatgactgaatgactttcacttaatgccagctcagcacctcccaaggaggtctgcttggttcttgttttctggctttcccatgcttctttctgcacctgcactcctgcctcatccttaggtgttccgtatttgtcctgtgacaccagaaaactgaacttctctgcgcgtgtcagcctattattgattttcagaaactttgctaaagatacagggatggtggtaaggggcctcagggtccaaagctttcttagtgatttcaccccaactcttctctttttcccatcatcaacattctttttttcactgtaagcagtttcttcctcttatctacatagagtagttccaatcatatccaaactcttaaaaaaaactttttaatttattttaatttttatggttattattcttatattttatttatttgtttttggctgcactgggtcttcgttgctgcacatgggctttctctagttgcagagagtggggtccactctgtagttgtggttcatgggcttctcaccgcggtagctcctcttgtggtggcacacagattctggagtgcaggcacagcagttgtggcgcacaggcttagctgtcccatggcgtgtgggatcctcctggaccaaatctgtgtcccctgcattggtaggcagactcttaaccactgaaccaccagggaagtcctcctttgtttttttctttaaacaaaacaggacaactttattgagctatgctttacataccatatacttaattcgttttaagtgtatcattcagtgatttttagtaaatttacaaagttatgaaaccatcactcagaatcctgttttagacctttttcattcccacctaggatgtttgtgccagtttatagtcactccttagtcccaccccaagctgtggcaacccctaatatacttttaagtctgtcactttctctctaaatttgccttttctgaaagtatcatataagtggaatcatacaatacatggccttttgtgtctggcttctttcacttaatataacttttcaaagcttgtcatgtattggtactgacattgtggttttgatttgcatttccttaatgattagtgatatttttcctgtgcttattaaccatttacatatcttattggtgaaatatctattaaaatcttttgctcatttttgaattagattatcttatttttgagttgcaagagttctttatacattttagatacaggtcctttattagatatatgatttgcaaatattttctcctgtctggtttgttttttcattttcttactggtgaattttgaagcacaaaaactttaaattttgatgaagtctaattcagtaattttctttttgtggattatgattttggtgttgttatctaagactgcataattcatgcttagggtttccttctctgttttcttctagaagttttagcttttacttttggtttatgatccattttgcattaatttttgtgcatggtgtgcgatgagggtctaaattcatcttttgcatgtgaatgttcagttgttgcagtagtctttgttggaaagaccatcttctcattgaattgccttcataaccttgtcaaaaatcatggatctgtatatctgtccttgaaatatcaaaccggaagtgtctttcagctttttttttctttttgaaaattgttttttacatttctgtgagcattttaggatcagtatcaacatgaattttgccaattctgataaggattttaggattctgataaagattacattgaatcagaaaactaagatcatggcatctggtcctatcacttcatgggaaatagatggggaaacagtggaaacagtgtcagactttattttttggggctgaaaatcactgcagatggtgattgcagccatgaaattaaaagacgctcactccttggaaggaaagttacgaccaacctagacagcatactcaaaagcagagacattactttgccaacaaaggtctgtctagtcaaggctatggtttttccagtagttatgtatggatgtgagagttggaccgtgaagaaggctgagggccgaagaattgatgcttttgaactgtggtgttggagaagactcttgagagtcccttggactgcaaggagatccaaccagtccatcctaaaggagatcagccctgcgatttctttggaaggaatgatgctaaagctgaaactccagtactttggccacctcatgcgaagagttgactcattggaaaagactctgatgctgggagggattgggggcaggaggagaaggggacgacagaggatgagatggctggatggcatcaccaactcgatggatgtgagtttgggtgaactccgggagttggtgatggacagggaggcctagcgtgctgcaattcatggggttgcaaagagtcggacacgactgagcaactagactgactgactgacattgaatctgtagattagcttggagagagttgctatcagcaatattaagtctttagatccatgaaaacaggctgtgttttcatttatttagagctttattgatttctcttactaatattttaaagttttcagtgtgtaagtcttacacttttgttaaatctatttttaattttttattgtttttgatgttatcatgaatggaattaaagaattatttttgttgagtttgttgctagtatatagaaatgcaattgaattttgaatgttaaatttgtatcctctgaccttgctgaactcattgattaattctagaaatacttggtggattccttaaacttctctgcttataggatgtgttgtttgtgagtaaagagtttatttcttcctttccaatcttaatgcctttaatttcttcactttccttccctctttctctccctccctctctccctttcctccttctttccttcatttctccttttctcctttcccgaattccactgcctggatccttcggtatagtgttgaatagaaatggtgagaatgcacatccttgctttcattccagtcttaggaggaaagcatttcactattaagtttaactatttaagttaactatataaaagtttaagttaaacatttaactattacctgcctacagataatgttatgtaacagataatgttacagataatcttcatgactcagataaccatgatggtgtgatcactcacctagagccagacatcctggagtgtgaagtcaagtgggctttaggaagcatcattaccaacaaagctagtacaggtgatggaattccggttgagctatttgaaatcctaaaagatgatgctgtgaaagtgctgcattcaatatgccagcaaattgggaaaactcagcagtggccacagggcaggaaaaggtcagttttcattccaatcccaaagaaaggcaatgccaaagaatgtttaaactactgcacaattgcactcatcccacatgctagcaaagtaatgctcaaaattctccaagccaggcttcaacagtatgtgaaccatgaacttccagatgttcaagctggttttagaaaaggcagaggaaccagagataaaattgccagcatctattggatcatcgaaaaaacaatagagtttagaaaaatatctacttttgctttattgactccggcaaagcctttgactgtgtggatcacaacaaactggaaaattcttcaagagatgggaataccagaccacctgacttgcatcctgagaaatctgtatgcaggtcaggaagcaacagttagactggacatggaacaacagactggttccaaatagggaaaggagtatgtcaaggctgtatattgtcaccttgcttattttacttatatgtagagtacatcatgtgaaatccatgctggatgaagcacaagctggaatcaagattcccgggagaaatatcaataacttcagatatgcagatgaacaccacccttatggcagaaagggaagaagaactagagccttttgatgaaagtgaaagaggagagtgaaaaagttggcttaaaactcaacattcagaaagctaagatcatgatatctggttccatcactgcatggcaaatagatggagaaacagtgaaaacagtcagagcctttattttgggttctaaagtcactgcacatggacactgccgccatgaaattaaaaggtgcttgctccttggaagaaaagctatgaccaatctagccagcatattaaaaagcagatacattactttgacaacaaatgtccatctagtgaaagctgtggtttttccagtattcatgtatggatgtgagatttgaactattgaacaaaagcattgaagaattgatgcttttgaactgtggtgttggagaagacttttgagagtcccttggactgtagggagatccaaccagtccatcctaaaggagatcagtcctgaatattcattggaaggactgatgctgaagctgaaactccagtactttggtcacttgatgtgaagaactgactcattataaaagagcctgatgctgggaaagattgaaggcaggagaatgagatggttggatggcaacaccgactctatggacatgagcttgagtaagctctaggagttggtaatggacagggagacctggtgtgctgcattccatggggttacaaagagttggacatgactaagcaactgaactgaactgaggcaggtagtgtaggaaggggaagcaggggacaaagatctgagaagtctttaagatgaacagagtttggcaactaattgtatacagtttacaccagaatataatttctgtgttatcttatcttggtcagaattgtatacagtgttacagtttatgggtaaggagattctggctttattttcctgagtagaattaaggtatatttatctccttttgggaggattgacttttttacagtacacattttcccccttcagttttctttttagctgccgattttaggtcagtgataatttttacaaatactaagattttaaattttttttctatagttcatttaatatgttccacgaagtagggagcattgttaccaccatgttttaggtgaggaaattgagataatagtgaaatgctgtagatcagaatgatggagacctccaagtctttttaatacactgctttctgaatctttaacttaaatattatccccagatagtgtcagatgggatacatgagtcatctgacatccttttttttttttcattctgccccaaaaggaagtgaagtgaagtcgctcagtcgtgcccgattctttgcgaccccatggacagtagcctgcaccaagctcctccgtccatggggttttcaaggcaagaggactggagtgggttgccatttccttctccagggaatcttcccaacctagggatcgaacccaggtctctcacactgtagacagacgctttaccgtctgagccaccagggaagagtcaaactctgtcttaaatgtgaagtgtattatagagaaggattatttctgttctttggtttcacaaatcaactgtatgtgtttttgttttcttggacttttagtcattactggtccactgtggacctagattctttaagaatttaatgcaggataacttacaaatgacagtgcctcaggtgggagttttatttaaccattcataaaagataggaaacagatcataccagtggtagtaattattatagtgttcctattaatatgttaatatgtgtcagacgttttcgctgggtatctttaactgacctcataggctagattttggagaatagagaaatcattaatatgaaatatttgttgtcgttcagtctctaagttgtgtccaactcttttgtgaccccaaggattgtagccagccaggctcctctgtccatgggactgtcccagggaggaatactggagtgggctgccattttcttctccaggggatcttcttgacccaggcatcgaacttacgtctcctgcattggcaggtggattctttaccactgagccaccagagaagcccagtatgaactataattagaattatttacctttggaaactttcttccatggaaagaggccttcagagttttatggatctgaattcgaacccagcatctacctttcataagcttgggaaagttgctctatttttgaaatttatctaaaaacgtctattttttcttgctgtagattagtatatagtaccgcaggaaatttggaaatacaaaaggcccaaaagagaaagtaaaaatcaccgtaattcttgatttagacaaaaatctctcaatgaagcttacattctagtgatgatctttgcagaccagaaattgcttaaatgtctaccagtagagagtggttaaatatgttgcagcgtatccatttcatggactcaatgttagataagaggagaacagtggttaagaataagtgctctaagttcagatcttagggctgttccttattggttaatatgacctgaacgtcttgaaatttcagtatcctcttatcgtacccacttcatagagtttttctgaagattaaatgagatataagaaatttaacactgtaaacagtatctggcacattgtaagtgcttggtaaacattgatagaatattatcattaattttatgtgctgatacagaaagattctcaagatatattaagtgtataatgtaagataccaagaaaaggttatgtaagatgttatatgtgagtgttaaaaagtaagaatttcttatatacacacatctttttcttgaaggatcccgaataaaacattaagtggtcacatgtggggaatgggattggggattggaaagggtagagaaatagaccttttgtttctacttctttgtgaagtttgagttttatttaattaatttatttagttttggctgtaccacatggcatgtggaatcttcccggaccagggaaaatcaaacccatgctccttgcattgggagcacgaagtcttaaccactagaccaccaggggaagtgcaagtttgcatttttaataccatgtatgtgtgtgcatgctaaatcactccagttgtgtgcagactctccagcccccatgcactgccaggcttctcctccaggggaccttccccagacagggagccaacctgcatctcttacatctcatctcttaagtctcttgcagtggcaggtgggttctttaccactacatccacctgggatgccccggtaccatgtacattttccttttctttcttttttttttttttaaagatgtcgtcttcttttaccaagttgttttgtcttttctccatagtaggaaattttattttctctacttctcatagtaactgtacttatgtagtggtaaagagttttaagtgtagttctggaaccagccctttgcagatttgctaaagacctattagagactactttgagataagtaaacatattgtcttattaaaacattgtttaaaagaagagtttcacatagaataggagagcattacgattcagtagtagtttttaaacttaccacttaacaaatgggatagtaatgatgttactaggctcttaaagaaaaagttagatacatttagaactcttctgttgactcagacttttttcctccccagcaagtgcttacctgattatttgacagtaatagataaaaaggtatacttcttgtctcctttcagtcagttagaaaccaacaatacttacaggttaatttactctgataagcatttggaaagttcatgtactgggtagtctcttaagttcatccttttttcttacctccatttctttctctccacttttatacttttctctccattctactttctcccgttgccattgtctcattatcttagacattgaagatgtaaaggttaataagatgtaattcctgctctcaggaagttcatatcaattgttccattctagcattcttattgaactacttttttgggaggaggaattacgaatttttctctcagttcagtcactcagtcatgtctgtctctttgtgatcctgtggactgcagcaccccaggcttccctgtccatcaccaactcccagagcttgctcaaactcgtgtccatcaagccggtgatgccatccagccatttcatcctctgtcgtccccttctcctcctgtcttcaatctttctcagcatcagggtcttttcaaatgagtcagttcttcacatcaattggcgaaagtgttggagcttcagcttcagcatcagtccttccaatgaaatattcaggactgatttcctttaggatggactggtttgattttcttgctgtccaagggactctcaaaagtcttctccaataccacagttcaaaagcttcggtgtttagccttctttatggttcaactctcatattcatacatgactactggaaaaacggtagccttgactacatggatatttgttggcaaagtgacgtctctgctttttaacatgctgtctgggttggtcatagctattcttccaaggagcaagcgtcttttaatttcatgactgcagtcaccatctgcagtgattttggagaccaagaaaataaagtctgacactgtttccactgtttccccatctatttcccatgaagtgatggactggatgccatgatcttcgttttctgaatgttgagctttacgccagctttttcatcctcctctttcactttcatcaagaggctctttagtttctcttcactttgtgccatacgggtggtgtcatctgcatatctgaggttattgatatttctcctgacagtcttgatttcttcttgtgctcatccagccctggcattttgcatgatgtattctgcatgtaagttaaataagtatgataacaaaatacagccttgacataatcctttcccaatttggaaccagtgcattgttccacgtccagttctaactgttgtttcttgacctgcgtatagacttctcaggaggcaggtaaggtggtctggtattcccatctcttgtagaatttttcacagtttgttgtgatctacacaaagtctttggtgtagttaataaagcagaagtaggttttttttttttttaactctcttgcttttttgatgatccagcggatgttggcaatttgatctctggttcctctgcttttctaaatccagcttggacatctggaagttcacagttcatgtattgctgaagcctggcttggagaattttgagcattactttgctcgtgtgtgagataagtgcaattatgcagtagtttgaacattctttggcattgcgtttctttgggattggaatgaaaagtgacgttttccagttctgtggcaactgttgaattttccgaatttctctatttagtctcatatttttcacttcagctttttaaaccttattaagtacccagagtgttctaggcactctcctagagggtgctaagctaggtaaaactaattgcttcgttccttgtaaggagacaggtaaatagatttcagaacagtttgatacatgctattcatctgctcagttatcacaatgaggtagtttttgatcggaaagtgccgccagacagttaaaaacaatacacattttctttaatggcagaaattaacctcttttgagacatttatacaaaaaaagggacatactcctgtcagaattaaaggttctttggcttcagtcattccccaaggaggttgcaaaggtacctctgaaaagtgagtgtgccaggtctgagtagccaaatctttcatatttcaccagactctttttttcccccaccatacttttacgtttgtgggttgcattactaccattccagaaaaacctacattgcaatttatgtgcttctttcaaagagaatgtttacaaacattgggttttcccattgctgaaatcaagctctgtctgcaaggccaggttctcattccaccagggaaaacagtctgactagtctgccgcctatctgaacgagcctcctggaaatgccattactttggatgaatgaggataaacacaatgctttgaaagcacagaggatgagtgtctaacctgagtaaaagaggcagaattaatcaggaatgtacggaggatatgatacatttcttgaagagtatttgccatacctgtattccatatttggttttctagttttctctgttaaggcagaatggtaataactgaagagttttaagcccttaaggtaaattatagacctcatttgcctttctaaaatataaggacattttcctccgttattatcgtactgtttcccacattaaaaaaacactaattcttaattatgtaataccttgtccatgttcagatttctcattatccttagaaatatcttgttcaaaccaggatccagttaagaactattcattgtatttggttatgtttaagtcttcctttctctttttgaatagactttaattttagccttatgtttttttggtgctaaagcttagcccactgcgtttatttattcatcacactgacttgttaaagagacatgacttttcttttggtttttgtctgattgccttttttagtattgttaatactgttttctgtattttttgtgatctagatattagatatacaggtttgtttttgcttgtttttaaactttttattttatattggtgtatagttgactaactgttatgttagtcattttaaatatagcagtgtaaatgtcagttccaaactccctaactatccgtccccacctgtcctgccctgataaccacacacacacacacacacacacacacacacacacacacacacacacacgcacgcacacacacgcacacacacgcacacacttattacaaagcaggaatagactcacagatttaaaaagccaactaatggttacataggtctgattcagttcaggttagacaaatttggcgcaaatacttggaaggtgatacaatgttgcatctgtttatttatttttgcctctttttgtctttaataccaactatacgcaatggtccaactgtgattcagcctgttggtcatcagtcttggacttgtatagtcacagctttggagtatcatctgttcttaccttttttcttttggggctttttagctagccctttttgccttgtctttgatatgttcccttacctggtaacattccatggtatattcccttacccttcttccctgagttctgtcttcagtataaacagtaccagttccaagagatattattcttatttgacatattacattgtggactttttttttggtaaactttataggagaagctcaactaacttcttttgttttagtctaaactctcctttggtttcccaggtggctcagtggtaaagaatccaccttccgtcttcacttgggcgtttcctctggtcccatgaagaataagtagagataagagaggcccagattaggcttggggcatttggaaatcatggttgatggggcatctgaaactgggatgaggttagatgaaaggttacatgcaacataattttccctttgtgaaccctttgttatttctaatgtctcatgatgaatggtcttagtgagtgcattttttttttttttttttggtaaaaactgtaacgcatgttgacatagtgagggagtttgtggaactggtcagagttggtaaggagataaataggtcaaatattggatcatgttcttcagggaggggaagaagatattctgctattataatttaagagcatgagtaactgtgggatttttgacctctttccactttgctgttgatgttaatagcttattagaagtaaaaaggtttccttgtattgctttactatatgagctacattaggaataggaaaaattatcaaaaagctaatctatgataaaggcttttaactgatatcaggaactatatttattatattacttgtcatgcatactttggaccatggtgtagttaagagagttttctgtttgggaaaatttcctcaattactgttgaggaaatcttttcatgtagagagtcttaatataaatacatcctttgctgggttgcagatatttttattaccattatagctcagtttggaagtggttcttattttacaaatttttgctgcttttctcttgtggcgattaatggctctgtggagattgcatgtctctgttattaagcaaaagattgtctcttttggaagtaatatgttaagttttgtttcatttttttaccattttgtgaaatcagagtatgtctttcaattaattgatggtgtaatggttaattagcaaggtttttctttcttagctgtacctgaagtaacagcaagccctaacagttagtgagatcttgaccttgatgaaatatagcagtttacaattcagattactcatggtttagccacagaaacactgaaacacagaagtggtagtgttgcggttggcagactgagttaagtagcactgaggaaggtagagataaaatatttgttctcttgttctctgcctctctctctctctctctttaaaggcgttttcatattttcgtctcagtcttgacaagattgtaaggcctttaaaccaagcctaatgaacattcacagtggatgggtgtcattaaaagacctgaggggaaccataaactgaagtgactgttcccgtcctctcacatccaggtgctttccagattttgccctttgccctctcctcaatctgtattctccttcaaaggttaccttttctctttagctttcacctctgatctctagtggtttcttcatgctcttctcttcctcccttgtctgttgtcagtcttttttattcatttgctttaaaaaaaaaaaacctaagactttttggggagaagttttagatttaaagaagagtggaaagtgaagagatcacccatgtttgtaccccaatcaggtatcccctatcattaacatcttgggttaatgtgaaacctttgttataatagataagccaatattaatacattattactaaagtccaaaaattatattcggtttactctttgtgttgtgcattctttaggttttgacaaatgtactgtatatgtatctattataatagtatcatggagaatagtttcagtgccctaaaaaatcccctgtgcattacttattcatctcttccttttccttcctcctacaacccctggcagctgctcttttttttttttttctcctctccatactttgtcttttccagaatgtcatgtgtggaatcatataataccttgtctctttcgcttagcaatattctcttttctttggcttgctagcacattttttttttttttttagttgctaaatagcattccattgtgtgaatgtactacagtttgtatatccttttacctgttgaataaacttccaacttttggcagttataaataataaattaattttttatgaaacacaaatatgatctaaagtacttcaagtaaagaaaaagttgagctaattcagtaccttgagccttaaaaaataacacttttacctttgtataaaaaatttctaattgagtagtcagctcccaacagtgctcaagaggtatgtgtggagtggttgaatatgaaaaaggtaaggaagtatggaagagaaggaggctaaaggctatatcatataatattcagataatttttggaaaatgagattgtctagaaattcagttggaaatttgagtgggcactaagatgtgtagggctctgaattcaaccgttaatttgagaacactccagaacaaagtatcatcaagctggcccagaggtgaataaacatttctctgtttcaagtgccacaagccaaatattttagggaaaatagcagtaaatgaaaccattgcctctgtttatatagggcatacatgaatgtggaaaaaaactaggaaggagaaaaatgcgagttaggttatgatgaatgctctaagagttttaaagaaggatattattttagctgtggtgagtcaagaagcttttatggaagtcttgctgtttaagttttacctttaaaatagttgagttgaatttgcggatataggagagaaacagcattctaggaagcaatttatgtttgttgagaagaatttgagatagagtataaaagctgaagaggtgattagggtcaaagtatagaaagccattaataccagagtatgcaaacagtttttattagttaagtaaaaatagggaataattttatggggcatgaatattgtttataaagtattttagaattaattttatatccttaaaatttatatactttataatatatacttctttttttaaatttagattactgttcagccaaattaactttttttaaaaaattttatttttactttattttgctttacaatactgtattggttttgccatacattgacatgaatcagccatgggtgtacatgagttcccaatattatatactttataatatatgcttcttatagctttcagctctatcataagccagaatatttccctgaaatgtcatatacaaaaagaagctttatgtaagttgactgtcagttttgtgccctgaatcagcattataaagacattctactataattataagcagtatttaccaaattagcttatgaatttataaccttactgatatgctgagattttgttgttctttaaatgaacttttaatatacttagctttctcccatttcaaattaagctgatttctttttgcaaacaatttatttgctttttttgttgcagaactgtggctgctgaagtcaggaagcagatctccggacagtatagtggctctccccagctgctcaaaaacctcaacattgttggcaatatatcccatcataccacagtaagtaatttgtttaagatatggtatgttactgttacattctgactaggccatgagaaacagtggaaagataagagccaggcctttgactgtgtggatgacaacaaactgtggaaaattctgaaagagatggcaataccagaccacctgacctgcatcctgagaaatctgtatgcaggtcaagaagcaacagttagaactggacatgatggagaaggaaatggcaacccactccagtactcttgcctggagaatcccatggagggaggagcctggtgggctacagtccatggggtcgcaaagagtcggacacgactgagtgacttcacacacacacacacacacacacacacacacacacacacacacacacacacacacacacacacacacacacacacacacacacacacacacacacacacacacacacacacacacacacacacacacacacacacacacacacacacacacacacacacacacacgtacacacgtcctgcaggagcccaggcgggaggtgggaacgcatgggcgggcggcccgtgcgcagactcagtgctaaaaaaaaaaaaaaagaactggacatgaaacaacagactggttccaaatcgagaaaggagtgtgtcaagggtgtatattgtcaccctgcttatttaacttatatgcaaagtacatcatgtgaaatgccacgctggatgaagcacaagctggactcaagattgctgggagaaatatcaataacctcagatatcaataacctcaataacataacctcagacaccacccttatggcagaaagtgaagaggaactaaagagcctcttgatgaaaatgaaaaagctggcttaaaactcagcattcagaaaactaagatcatggcatctggtcccatcactgcatggcaaatagatggagaaacaatggaaacagtggcagactttattttcttgggttccaaagtcattgcagatggtgactgccaccatgaaattaaaagatgcttgctccttggaagaaaagctatgaccagcctagacggcatattaaatagcagagccattattttgccaacaaaggtccatgtggtcaaaagctatggtttttccagtggtcatgtatggatatgagagttggactataaagaaagctgagcgctgaagaattgatgcttttgagctgtggtgttggagaagactctttagagtcccttggactgcaagataaaaccagtcagtcctaaaggaaatcagtcctgaatattcattggaaggactgatgctgaagctccaatactttggccacctgatgtgaagaactgactcatttgaaaagagcgtgatgctgggaaagattgaagacaggaggagaaggggacaacagaggaagagttggttggatggcatcactgactcaatggacatgagtttgatcaagctccaggagtagatgatggacagggaagcctggcgaagagttggacacaactgagcgactgaactgaactgaagtgccaggaaattgggttccatcatttgttacctcacttttttctgaaatttgagtcaggggagtgttgggaggtgttacagaagtactgatttcctaatcaactccaaaactttatattcaggatttaatcaactctgaaattgtataaatagaatgtctcagacccaaggtggattcatacatgaaaattcaggaatcttttctagaaataataggtactgaaagtagtgaaagtaagtcatttggttgtgtctgactctttgtgactccatggactatagcctgcaggcttctctgtccgtagagttcttcaggcaagaatactggagcgggttgccattcccttctccaagggatcttcccgacccagggatcaaacctgtgtctcccacactgtgggcagattctttactctctgagccactggggaagccccagtagatactgaagtaaatgttatataattgtgtagattcatactattgtctgcctccttcgatagaaaggaatatatagttttgaattattgctttaagccaggagctgtgtcagagatataaatatatgtttttttttttttaattcaagaggctggcatgaggataatcagttttaattaaaaaaaaaaccctgatacttagttgtagtaggaatatgaatttaaaatatgctccatttgtcaaaaactgaaaatgtagttaagagtgagttgggtaaagttatatcaacactttctttttatctgtgaaatagtaccaattattgaacgaacatggtatgccagagcatagtagtttgaatggcttgtggtgacgtgtttataatgtttgttattaaattttaagatatgaagtttacttttaacaacagtaacatactgattggagaaagtttataatatgtagatttctggatgatttcagtgtgcacagagatggtccttctaataaataccctcttgagtgtcttgaactcctcttttcaactgatttcctgtgttgtgtgctacaccttcactgttcatttccatagtcatccctggatttggtcattatgaataactgtaagccttatataatctcagttccacagttcttatgctctgaccaccgcttcttctctctcttgctctctcattctggtgctctgacttcaactgatcctgcgaacgcttttaggtctctcactccttgatgttctttttttcttctccttaccaaacttaaattatttgttgaaatctataattattcttttgcatgtaccactgatttccttaacttctcatgtcattggcactacctcagcactgcttaaacccaaccttctgcttacttcatgtcagcactcatgcagctgggtgtggctggagaaaaatacacaggtctcactttacatatatgaccactaatgcatgaaggcttctacattgcttaaactaaaaatattttattttcctagtctgttcattctcctgctgttttagttgactcatttcatgcttcctgctcttcccttaaaatcctaatcgctcttctctattttcagtcttaggatgacttgccttcctgtttcactgagaaaattgaagcagtcagggatatccacatactcctactgctatatgtattcaccttttatcttctgtgcccatattgtctgtctattcaccagttactttagataaaccactagtgaactagatcccaacttctctgttactaaaatacagtactttagtaattctccctgctcttttatgtcattacttttacattcccatcagtttacaaacatgcagatgtgctgctatttctcctatttaaaagaattctttttttgcccaacttttccatcagtctcccattttcagtatttctttgctcttctttgcaacagaattccttcaaaaggttgtcagagcttgctgacttcaatttctcttatattctttctgagaaagctcttttaaagttatgggaatgttcaaacatacacagaagtagaagacaagtaaaaacattgacatttttttacttagccacaatgctgttatcacacttaacaaaatagacagtctgtaattctttggtgtcatctattatccagtgaatgtttaattttctcaattatttcacttgtctttttgtagttgatttattcaaagcaagatcaaacaaaatccacagatggaatttggtcttagatcacttgcatttaaaaaaagagggtagtttctccttcctcttttttttttttttaaattgagatagggctgacttataatactaaataagtttcatgtgtataacccagtgtttcactatctttaatggttgtaaaatttatagctattataaaaattgactctgttccctttgctgtatagtatgttcttacagcctatttattttatagtagtaacttatttccttttggccgtgctgggtctttgttgctgtgtggctgtttccctagttccttgagcgggggctactctagttacagggcacaggctgcttgttgcagaacacaggctgtcaggtgtgtgggcttcagcagttgtggcgtgcgtgctcagtggctgtgcctcctgtgctctggagcaggggctcagtcgtggtgcacaggcttggctgcttcacagtgtgtgggatcttccagagcagggactgaacacatgtcttctgcgttggtaggcagattctttaccactgcgtcaccaaggaagccttacagtagtaattttactttataatcttgtacccctttcttggttctgtttccccactgataatcactggtttattctctgtatctgcgagtctgtgtttttttttttttgctattgttgttatattctttagtttgttttattttatagattctacatatgagtgatagtgtaaaatatttgtctttttctgtctgatgtattttactaagcgtaatatcctccaaatattagaccactacatgttgctcatatggtgatctaatattctgcaagggtgccaagagcatccagtggggaaatgatagtctgtttaataaatggtgctgagaaagctaaatagacacatgcagagcaatgaaatcggtcccctatcttacaccactcacaaaaattaacttgaaatggctcaaagtcttaaacagaagaggtaatagtataaaacttctagaagaaaatgtagagaaaaagctccttgattttggtcttagaaatgattttttttttggatataataccaaaagcacaagcaccaagagcaaaagtcaacaaattggggctgtgtcaaatttaaacacttttgtgcagctaaagaaataattaacaaaagacatcctatgagaattccaggaaaatatctacttctgcttcattgactatgctaaagcctttaactgtgtggatcacaacaaactggaaaattcttcaagagatgggaataccagaccaccttacctgcctcctgtgaaatcagtatacaggtcaagaagcaacagttagtactggacatggaacaatggactggttccacattgggaaaggaatatgtcaagtctctatattgtcaccctgcttattgaacttacatacagagtacattgtgtgaaatgccatgctggatgaagcacaagctggaatcaagattgccaggaaaaatatcaataacctcagatatgcagatcataccaccttagtgaagaggaactaaagagcttcttgatgaaggtgaaagaggggagtgaaaaagctggcttaaaactcaacattcaaaaaacgaagatcatggtatctggtcctatcactgcatggcaaatagatggggaagcaatggaaacagtgaaagactttattttcttgggctccaaaatcacagcagatggtgattgcagccatgaaattgaaagacgcttgctccttggaagaaaagctatgaccaacctagacagcctattaaaaagcagagacattactttgccaacaaaggttgtatagtcaaagctatggtttttccagtagtcatgtatgcatgtgagagttggaccataaagaaggctgagcgccgaagaattgatgcttttgaactgtggtattggagaagactcttgagagtcccttgctcagcaaggagatcaaaccagtcaatcctaaaggaaattaacactgactattcattggaaggactgatgctgaagctgaagctccaatactttggccacgtgatgtgaagagctgactcattagaaaagaccctgatgctgggagagattgaagacaggaggagaaggggacgacagaggacaagatgattgggtgacatcactgagtcaatggacatgagtttgagcaggatctgggaaatagtgaaggacagggaaacctggtgtgttacagtccatggagtctcaaggtgtcgggcataactgagtgactgaataacaacagtgggaacaaaattttgcaaaatatatttcagataaggggggtaataaccaacatatatagagctcatgcaacttaatagcaaaaaggcaatccaattaaaaatgggcaggagaactaaatggacattttttcaaaagaagtcatccagatgcccagcagatacatgaaaaggtgctcagcatcactaatcgtcaaggaaatggaaattaaaaccacgatgagaatattccttcatacgtgttagaatggttatcatcaagaagtgcacatgactgaagcggcttagcagcagcatcaagaagtgatcaggttgatgataaccagcctcgatgttgttatcatcaacaagtgatagtagatgctggcaaggatatggagaaaagggagcctttgggcacttcgggaatgtaaagtggtatagcgactggggaaaacagtatggaggttcctcaaaaagccatatgatccagcagttctgcttttgggtgtttatctgaagaaatgaaaacgctaattcaagaaggcacacccccgtgttcctagcaacattactgacagtagccaatatatagaagccacctgaatgcccatgaacagatgaatggatgaagagatgtagtgtatctatacagtagaatgctgccccctcccccgactcttagtttgtttctgtgccattgacttgttgaggaaatttgattacttgcctcacagtttctgccttttggactttatgtatacttccttgtagacttgtttttctatttcctgtaactgattagattctgattcaactttttggaaatttcttccttgtatacttgtttttcccatcttctatattttctgtgtatgattagattgtttcagtttttttttaatggttttaaattgagatttatttcacataaccatacagttcacccatttaattgatgattcagtggatgtaatatattcacagatatgtgcaaccatcataacagtcaatttgaaacattttcattacctcaaaaagaaatctttggctatcaccctttaattaaccctcccttccctgtagccccaaataaccactaatcaaatacaagaattttgatggtatacctgaagagtttgaaagagatcttaacactaaacacatcagtcacagctccaatacagtgattgttgaaagaagacagggtctcacattgcctgtaagagattctagtgcttcactgttgcttcttcttgtcaccctttaaccctgcttactgtctggtcgctttctattataaagtcatttttcagtctcctcccttggatctgtaaatacaggatctttctttggagtcttgcaaaataatatatagttgtaagcatcttattactacatccgaaaactagcccaggcagttgtctctgatgggaggcagggagagtggagacagttgtagcaaacatatacttattttctggttccaagtctagctaacagtaacacctagaaaaccagtgactttcattgtgactttggtaaacaagatcatttatcttctctgtcatttagtgttgagagtctcttcagtaagtagtgctaggaaaattggacagctacgtgcaaaagaatgaaatcagaatacttcctaataccatacacaaagataaactcagaatggatcaaagacctaaatataaacctctgcctacttctattttctgaagatattctattttcttctagcagccttgtagttttagcatttatgtttgtatctgtgatccatctcagtttagtttttgtacatgctgtgatgtaaggattgaggttcatttcctccccatatagttatccaacttttccagcaacagtaattgaaaaagatttccctttccttgatgaattgcttctttgcttctacaaagaatgtcatgatagtgtatttatgtacttgatgaaatagtgagatagaatgcttatgagagagaaaaccatgaattttatagactttgaagactcagtttgaaattttgctccatcattttgtggctgttatttccagaagttaacttctttgaccacagttgcctttatttgtagaactgaaatagtaattatctctaacttacaggatttgggggaggtttaaatgagaaaacacataaagataatgacaataattattactatcctttgagtatttatgatattataattattcagtattttacttatatctttaaaatgttgttttaagagctctgtttagttgttcagtccagagaagtttagattaaagcaccttctctgtagtaatgtgaacttgcatggtagcaagttggagtattttttacccgattgagtatcgtgaaaaataacatattcttattttcattgatctatagctgcacattttttatgttaatatatgaaaagataagatcctttatagttttgcctgaataatttttctttcttgaattagacaagaagtagaataccttatcaaaaactattatttcagcttggctaaggaatgccacaaatactctgttattgctaataatacttttaatatggtctgtgttactgcaagctaggtggcttaaatggagaaggcaatggcaccccactccagtactcttgcctggaaaatcccatggatggaggagcctggtaggctgcagtccaggggcttgcgaagagacggacacgactgagcgacttcactttcacttttcaccttcatgcattggagaaggaaatggcaacccactccagtgttcttgcctgaagaatcccagggacggggaagcctgttgggctgccgtctatggggttgcacagggtcggacacgattgaagcgacttagcagcagcagcagcagcaggtggcttaaaacaacagaaatgtactctgtcacaatgctggagtccagaagttttgagtcagtatcaatgggtagaaatcagagtattggcaaggtcaccttttcttcagaggctccttttagtatcactttattggttcttccagattctgatggctgcttgtggttatatcacttctatcatgaaggcgagaatctccaagtctctcttatctgtttcttcatatggttttccccttgttgtggcccatatctccctctgtcttcgtttaaggatatatatgattgcctttcggacccactcagataatccaggataatgtccctattttaagatccttaatggtatcttcaaatagtgttttattttgtattttatttatctatttattttgacatttaaggttcatggattgggatgtggcgatcttttggagggccatttttcagcctaccacagtatgctatatgtttttactagggtaatcggcagtaacaataaagacaccattaagaaacttaaaaatgaaaattcaaaattataaaaaagaattccttcaatgagcattttgtcattgttaagtactataaacctgttaattatcttactgtttttatgtgggagttaagggcaaaattgaagcaagacgatcaaaagagagtttgactcaagcacaaagaactataggaaggccaacacctgtgatttctttagtacatctagctgaatatctgttgacattttagagataacgagaaaaatacatttttttaaataataaatttcctttataaagtttcaaaattcttgtatccatctgttcctttctacccacctctctcacccacccctctttataaaggtgccgcttactgaagcagtggacccagtggatttggaagattacctccttactcatcctttagctgtggattctggacctttaagggatttggttgaattccctccagatgatattgaagtggtttatagtcctagggactgtagaactcttgtttcagctgtacctgaagaaaggtaaggagacatctacctatttctagttttagtgtaactataaaacaactgccttccattattttatttggattccgcttcttgtggtggttggtattcaacaagaatgcagcagcaaaattcataaacatcagcgctttcctgtctaaattatattttcttttttaaaacagtgaaatggatccacatgttagagattgtattagaagttataccgaagactgggcaattgtgatcagaaagtaagttgtatattcattgtgatatttaaaaatactgagcaggatctataaatggattaaggtaggttactactaattatgagagctgaaaattcatttgaaaaatagctgaaaaagtaataggggaacctttgcatatagatattttctccttagaagttctacacttagctttctcttattttccttataaaataatactcaatggacataagtttgagtaagctccgggagttggtgatggacagggaagcctggcgttctaaggtccatggggttgcaaagagttggacatgactgagcaactgaactgaactggggatagtattcctgttattacagatcattaataattactaataatatgtaataataatgacttatagtagtcttttgggaaatcatgggtaaatattgatgaataatttatatttgtcaaatggatccaatttattgaattaagttaaatttaacagctagttttctagatcaggctgtttgaaaggtcttgggcgtttattaaccagctgaatatttataggtccttgacctgtatatccagtcaagtaagtatttgtaaaaataatgttttgccacaaaatttgttcctagtggatggtgtttgaaatatcaagtcagattaagaaataaaattacttttcctttgctaacttgcatagtgaagagagtctttatgctgaatgttcttggcctcatcctgtttttctaaaggaagaataattagtaaagtagtggaaaattctgttaagacattacagttttgagaaatgaagtttcctgtgctaaattgtacttactagcaacagtgatgtgttcattgcttattgtgttgcccttctgtcttatttcactgcgtttaatactgtgctaagcatcactcttggggatactgctgacatgctttttagttttagtgtgacctaataaaagcacagtctgctaccctttataaagaagagccgtttttatgaacttaaaattttgataagtatttcaatagccagattttacagattactgaagaatactgttcctctgtcccataactcaaaagtctttacatctgcttgtatgttggaagcttataatcagaaatgttaacaaaaagagattagttgcaaaatatattaacctcatggaatctggaatctgctacttaacgataatcatggggttgctcaccttgatttaagccaagagggtatggtagttaacatttatggggttttttttgctatatgctgggcattttattgggtactttatgttcatttaagattccaacagataaggtaacttaggcttagagtagttaagtaatttctttgaggtcccatagccaaaaagtgggattgttaggactagaacctaggggcatcagactctaatgcttatattttttttttctgttatactagatattatttttagtggtagatggaagatgaaaggggtacttttggtagtctagaagttttaaagtgtccctaaaatagaaaagataggtgtgattggaaacaatagaaaaccacagtacaaaataatccaaggagaagatacatgcccaaagttcaatagaatgttaggctcagtgaatacaggcagtagaaggggggtaacatttacctggggtaaatgttggacatttggttattttaaaacctcctatgcctttatgcatagacttgggagtagaagtatccctattttaacagcacgaatggtgggggcttgagaacctcgtgcttccctggtggctcaaatggttaacaatctgcctgcaatgcgggagacctggattgggaacatcccctggaggagggcatggaacccactctagtattcttgcctggagaatccccatgaactgaggagcccgggaggctacagtccatggggttgcagagagttgaacatgactgactaagcacactgcagagatcatagtgtagtgcccagggtgggcataccttggaataagaagaaggagcctgcatacccagaagactggcagactctaccttgaaagcacgagatgcgttttctccataatcactggatatgtgtttggctaaggagataaacagtatttcccagacagatacgcacttacaaattaaaaaatgagcgttagaacctagaatggccagctagttgatggaaaccagttcactttggcttccaaggtggtgcagttggtaaagaaactgcctgccaatgcagaagaggcaagggatttaggatcaatccctgggttgggcagatcccttggagtagggaatggcaacccactgcagtattcttgcctcggaaactccatggacataggagcctggtgggccacagtctgtggggtctcaaagagtcagacgtgattgaggacaaacaaccaatctaaaccaaagtgcacttaaaagagaattatcaaaccacaaataaaagagctaatgatttaggaaatagttaatagaacacagatcaagaaccatatatataactaatatcctcaaagagatatgaaaagatactgtaaccatataaaaactcagctagttatctatggaagtgaaaattttgttcagtgaaaaagaatttaaaactctggatgggtttaatggtggagtagatgtgactgaaaagtggaatagtaagttgtgagatgaaaccaaaaaatccttccataattcagcacagaagggtaaaaggatagaaagtgcttaatattcatttatttattcaaaagatacttattgtgagactcgtatgtgccaggcactatattaagcagtgatgatacatcagtcaacaaaacaaactccatgccttcatagagcctgcattctacttggggttgaaggcaatagacagtaaacaaacacagataaatatttaatagttgtggtggagggaagtcttgtagagaaagaaagtaatatgtaggggtagggcaagccaagcagaggtgtttttactttatataactaatcagagaggcctttctgagaagatgactttcagcaaagacctaaaggaagttaaggaggaaaccgtccgtatatcatgggaaagagtgtatttgacagaggaagagcagtacgtgcaatggttccatattggaagcatgctaggactgtttaagaaataccaaatgatcgatgtggctggaacagaataatttgaaggagagaatgctaagatacaaagtcaaagaaatggcattggtggatggatgatcgtgtagaacctcatagcaactaactagaggaatagaatgataatacagaagagtattaatcataaatcatgtccttcatctcagtactcttgagtttcatactattggttttttagaacataaaattcaacagtattctggcttattagagtagcttagctataaaacttcacaaatgaaggtactcttttccactgtatctcatttttattaaaattacaaatactataagtatgtatgtgtgtgcataatgtatatgctaggaaaaggtccagttagttaaataataggagtgttcaacactgataatctctgagtagtagaaatataatgatttcacaagtctgtatttttaaattttcagcaatgaacatggattggttctgtaataataaaatatttttaaagaaaactttttcatatagaaaagcaacagtgtattctgtcctttaaaatacaaatatttccattgagaacaaaagatgcagagactagaaaacagttcagtgtctttcaaaaattatctagtgatggttttggctataaagttttatctacttgtctttagttaacatgatttttagttaatcaggcttgtgtttgaattcacactttgtcactttacaaacacttttacacaaactaaggcactttaaactttcatgaaatattagaacatctgcttttgagtaatactttcatgttactatattgcatatctttgttttggttcttccagagaaaactgctgttttttattctatgattatgctatgatatgaacatcatgtggctgctgtttcagtacctttagcaacaagacacaatgtaaataattcatatcgggtgtgtttatttactgtgtcatcaattgactgataaaccataatatcctctggtaattataattgtttatacttcaaataaaatttccccaaatgtgactatatgaggtatggcacagtaaatgctcttgattgtagtgtctctgataatcttggatattgggttgtttggaaaaaagcttgtattaagagttcttagcctaatatatatattatataacaatatatgttaagtatatatatttatatacacacacacagtggtgtggatcctgctgtttttcattttagaagtctgaagctttaggttgcttgagatctttaatacacaatgaggtacagcaaaattttttttggctgtttgaaactgtggttcaatactttctctatattttgccttttaaaaatttacactgttatgaatgcaatttatattttctactctttcattttatttttaacctggcttcccatcatttccttttactgactagttttctcaattgaaagtacaacttaaaatacagtatatccacaggattgtcatgaaaaggaggacattatgatttacctctggaaactcataatctgctgtctagttggattaaaggaactttggatggacgtttcttaaacctttggttaaatgtttaatgggactcccctggtggctcagatgttaaggagtctgcctgtaatgtgggataccccagttcagtccttgggtcaggaagatcccctggagaaggaaatggcagcccactccagtattcttgcctggaaaatccagtggagggaggagcctggcaggctacagtccatggggttgcaaagagttggacatgattgggtgacttcacttcttcttaaatgtttaatatactcaaaactgccagaatatattcttactatgtaaagaaatggtatggagaagagttagcttattatataatgatgatgaacatgaaaaaattttggaaaattgatatttacttaactattttattttgaatagatatcataaactgggaacaggatttaatcctaatacattagataaacagaaagaaaggcaaaaaggtttgccgaagcaggtgtttgaatctgatgacgctccagatggcaataactaccaggatgaacaagtaatacttttatttttaaatgactataagacattattttgaaatagtttattttttattcattgattaatatatttaatgttttgcacggcaggatgatcttaaaagacgttcaatgtcaatagacgatactccaaggggtagctgggcctgcagtatttttgacttgaaaaattcacttcctgatgctttgcttcccaatttacttgatcgaactccaaatgaagaaatagaccgtcagaatgatgagcaaaggaaatcaaaccgtcacaaagaactctttgccttgcatccatcaccagatgaggtatagaaacttggataaagaagcaaaagattatagatgttttgggagtatgaactgtatatattaatagttttatgataaatgtggggaataaaacttaatggaaatatagctaagctttttgtaaatgaaatataattgagcacacttataatctaatgactttagtttgaggataaataggccattcttttctttgcttacttgtgaagactaaaagtagtaggttaataaaataagttcttaaaaaataaattgtaaagggttgaaacatggtaagcatgttcatttgggtgttgcttgttaatttgcaggaagagccaatagaacgacttagtgttcctgatgtgcccaaagaacattttggtcaaagacttcttgtaaaatgtttatcactcaagtgagtatttattttgtttactatataacttttcttttttggagtaatgttttgagtaccagtaaaaaaaaaaatcctagtggatttgtgtttgtgttcttttgaaaagtattgttctatacataattttaaatgcttccaagcatttaaccttacctatgaagctgaacttcagagcacttttggctcacaggtgaagatgactctttgcctcagttatataattatcttaaaacgtgaaaaaacattcactgaaatctgtagtatttatcagacactgttcttggcttgaggaataccagtagtatcttttttcttagagttgattttatatttgtttcatggtgtgtagtaggtcgcttcagtcttgtccgattctttgtgatgctgcggacggtatcccgtggggcttctctgtccatgggattctccaggcaggaatactggagtgggttgccatgcttttctccaggcgatcttccccacccagggatcaaatccacatctctggtttctcctgtataggcaggctggttcttcaccactagcgccaccagggggtggacttcttttttaagcttttgaagtatgtgctaacagttgatttagactgtggaagatatacatggaaaagtgtgttcaaggaagatgggtagtatagatggtataacacaggtagataaaagtacatggtatagagagaatttatttttggaatgagaatttctctcgaactgtgtattttacatatatatttaaaactcatccttctccttcctaaaggtttgagattgaaattgaacccatttttgcaagtttggctttatatgatgtgaaagaaaagaaaaaggtaaggttatataatttgaacgtagtcttttgtcacaatcagaggttctgaaacctgtttctaatttgttttataagataatgattttttgagactattattaaacatggatattttttaaaagaaaatagaactgtgagacattattttactactgtaaaatagtttagttgacttattttttgtttcattgaaagagttcgaaaaagaagtggcaggagcaactttatacaaggaaagcatcttaggcaaatgatgtgtaaagagttagattgatggtgacagggacgttttgttgatgtaatttttaaattctcactagctattattaaaagatcatttatttatattttaaatattcttgtctaaaatattgctgttggttttgctgttatatctttgttacacttaggagtttttcagaggacttatcatacagcgtttttagtattctaagcctcccatgcagtagaaaggtgaaaggcctttagtgacttctgctgtcagcatattgtggaactctactccagcatcttgtatttactaaatcacatcttctgaaatgttgtttaagttttcaaagactcaacttggggtaattcatattaataatagtttctttatatactttatcagaagtcaaatttcttactaaaagagtatgggatatggttctttagaatatgtttttgcattaattctttttgttttgatttagatatgtaaagatctttgtatatcttcactgatagtgaaatgtatggtacattgtatgttagtataattgtttaataattgtaatcttttaagactgaatatttatggtttttgtgagtgtttataaaatgcacaggttttaaacttaacatatgaatatgtgttttagatttcagaaaacttttattttgaccttaattctgagcagatgaaaggattattacgtccacatgttccacctgctgccattaccaccctggcaagatcagctattttttctatcacttatccttcccaagatgtttttcttgtaataaaggtgagaataatgttaaatatatttgtttatttatgttatgtctgtgtacttgtctgcctgtcaatatcacaagctttttaaggtcaaagattttatctttgcctattttttcatgttaatattttttaacataatattggacgtatactataggtgctacctaaattcttcttgagtgggaagctttattagaattctctaaataagcagatcaataggaggaaggtacatatacatatggaggattgatatgttatagtcttgagaatccatctttgagaaaccttagtctttgtagtgttcttgcctggagaatcccagggacagaggagcctggtaggttgtcgtctatggggtcgcacagattcggacacgactgaagcgacttagcagcagcagcagcagtctttgttcttgaggtcttcaactaactagataaggcccacccacattatgaagggtaattgctttactcagtctactggtttaaaagttaatcacctctaaaaaaataccttcacagcaacatcttgactggtatttgataacttagctgcgttggcatattaaactaaccatctgtggttatttggatatggagctatactgtggttttatcatgtagttcctaaattatataaatattaaaattaaatcattgaaatcatggagcattatgatttgactatcaatcaattaagaataaggattacagatactaaaatttgaatactaagctacctagcttaggataacttaataattatttaccttaacttgaccttgacttgagagttgcctaaaatatagtctttaatcattttacgttaaaattatcataaaaaggtaatgaattttataataaggttataaagtagattgtcatgaaatgaattttatttacccacaggaataatgtcctaatttgtggatagattcctatgaattcaggttaagataaatcttagttacaatgaacaattctccaagcaaagatttagcagcagtggtcttcagaaagtcacttataagtaaagttctagatattaaaataattgacaaatgtgtatacaccattattttacatgggaaaataataagtttgcataaaatagaacatatttgaggggacgaactagaaagatagcgatgatgattggaatactgtctgcttgaaaatgagatggttcataccatatggtcccaattgtgtaaaatacatacacatatacctaaacacacataaaagtttgtatataaacagaaaaagacttttgtgtaatttcaaaaatatgaataagttaagatgtgtacaaattttaaagaaattatatttaaaagttttcttttatcatagtccagcaatataattttgttttttttgagaggaaattcccttggtctatatattagttagttattcctctacaagaacaaaacgacgaaagtctccgtggcacccagcagtcagcacttgtttagttcctgcgcctgagttgtctggtggccgctggtctagctggtactctgttaggtgcttgtgctccttccaggtgcctgcaggttggtcagttgatttccgtactccattcagtgaaatcaccagcgtcacagggaggcccagtggtaccgctgagccaccagggaagcccagggattagtgaagggcttctcaggtggctcagtgataaaaagaatccatctgccagtgcagccgatgtcagttcaatccctgggtcagaaagagtcccctgcagaaggaactggcaacccattctagtattcttgcctgggaaatcccatggacagaggagcctgtcaggctacagtccatggagtcacagaagagtcaggcatgacttatcaactaaacaacaacagcaaattgattaatgatgttgagtgtgttcgtcatatgtttcttagatacttgtttggcttctttggcgaaatgtctgttcaaatcctttgctcatttaaaaatcaggttatttgctattctcttgatttgtaggatttctttatctgttttggctattaattctttatcagttatatgatttacaagtattttctctctcattctgagaattgccttttctccctgttgattgtgtcctattatataaaaaagttttaaattttgatgtaatccagtttaatgatttttacttctgttgcctttgcttttattgtgtaaaatccgagaatctatcactaaatttaatcacatgaagcttttcctttatttttcttctaggagttttatagttttagggttcttttttggggacggtctttgatctgttttgagttaatttttgtatataatgtgagggttcaactttattcttttgcctttagaaatttagggattttttaaacaccatttgttggaaaacctattctttccccattgaatagtcttggcattcttgtagaaaattatttaactctacagttttcagattacaaatctttcagctttttggtttatacctcagtactttattctttttgatattataaatggaattattttcttaatttcctttttgaattgcttgttagggtatagaaatataacttatttttgttcattttgtatccttcaactttgctgaatttatttatttattagttgtaaagagtaagatcatggcatctggtcccatcacttcatggcaaatagatggggaaacagtggaaacagtggatggttttatttttctgggctccaaaatcactgcagatggtgactgcagccatgaaattaaaagacgcttactccttggaaggaaagttatgaccaacctagaaagcatattaaaaagcagagacattactttgccaacaaaggtctgtctagtcaaggctatagtttttccagtggttatgtatggatgtgagagttggactagaaagcaagctgagtgctgaagaattgatgcttttgaactgtagttttggagaagattcttgagagtcccttggactggaaggagatccaaccagtccatcctaaaggagatcagtcctgggtattcattggaaggactgatgttgaagctgaacctccaatactttggccacctgatgcaaagagctgactcattggaagagaccctgatgctgggaaagattgggggcaggaggagaaggggacatcagaggatgagatggctggatggcatcaccgacttaatggacatgggtttgggtagactccgggagttggtgatagacagggaggcctggcatgctgtggagtcgcaaagagtcggacatgactgagcgacttaactgaactgaactgaatcattttttttggaatattagcattttctctgtaaaagatcatgttggctgtaaatagagataatttaaattctttttaaatttgaatgtttttgtttctttttgggcatcctttttcttgtcacattgctctggctcagacttctagtcttttgttcaatagaattggcaaaagttaacgttcttatcctgttcctgattctaaaggaaaagctttcagtttttcaacattgaataagatgttagatgtgaacttttcatagatgggctcttattggggtagttttcttcttttccaagtttgttgaattttttttttaatcatgaaagggtgttgaattgtccaattcttttttctgcaataattaacatggtcatgtggttttgttctgttattctgttaatgtgatgtattaagttgattgatttttgtatgttgaaccatccttccattccaggctgattgcttttatttttaagcttaattaatctttcctttttttgcctttgacagctagaaaaagtgcttcagcaaggagacattggagagtgtgcagaaccctacatgattttcaaagaagcagatgccaccaaggtagaatttcatgcatcttattccccccactttcatcgtcattagcagtcactctccattcccctgagatcaccaaacccaaccctaaatagtctctgatctccaaaatataatctgagaggatactatactgagcatattaaataattttactactgattttactactaaaattttcttttttttctctggtggcctacttgttttctttcttctttatttcctttgtcatctagtttgagtcatgtgctatgctattctttgacatctccccaaccccaaactagttgactcttaaattttttttttcttggagagaaagtaattcagtttaattcctaaataatgaaaaatgttctgtatttacaaaatagtgatttttttttttttttggctacgctttgcagcttttgggattcccagccaagaatgggatccatgccccctgcagtggatttatggaattcaaaccactggaccatgatttttttttaaccaaacagtgatgttgatgaaactttttctagcgaagcagatgaattttggatatcagtctagtggcagataattagagaatattgtaaaaatagaaaatatattctcccctttgccaacagataacaaatttatagaatttggataaacttatgaagcaaaaatagttgatgaataattggtaccaaattctaggtactctgagttagctataagagtaaaaggtgatttttggatctttgaacacatgatttaatgtcaaacaggcagaagtatgcttgaggagtattgaacaaatcatcaaaatgtagaaaattgttgctttctgtttttctgagatttataacaagaattgagccttttttgctaatatgggtacatcggagcacatgatgttctctgatgcctagatcctagatatctggttgcaagtagggttaaagtattctggctttccccaggtcgtcattttacaaattaacttttctctgtcgtatgaaactcataggtgtgtcactgtggcttatttcactcttcccttacgtatttacataatttcaatgtgggtccttaattctctgtaagtactcctaaagcaaggacctgttttggaggtataatagacatagtaaaaaccattcttatcatttcggtatcgcttcatcttttctcagtcctgagtcccatggtaggacactgccattagagtatgacctcactgatatcttatatggaaggagcacatgagagattttggtgtagattttcacccttgaactatggattgactattgtaggccacattagtgtttgttttaggaatagcctaaaagttgagccagcttcaggttgtcttccagataagcatgtactgtttggattattaatctttttcaagggtttagtccccttgtactttttttgtttgcttctcttatcacaattctggacatattattgttggtctgtttgtgccctacctacttctacatcataattgtcgtaagttattgattatttcaaagtggcccaaatgcttccatttttttatagaataaaaaaattaataagtcataacctagaatattttgtgattgacagttgatgactggaacatggctgtatttctttcataaaatagtacatgttgtatattaacgtgcttgacacttgctctcctttcttttatcccaaaataagatcatgacaaacaaattttaaagacttttagatgcatttgtagaactggttaaggttcttcactccagtactcttgcctggaaaatcccatggacggaggagcctggtgggctgcagtccatgggatcactaagagttggacacgactgaagcaacttagcagtagttaatatactgttaattggggcttccccagtggctcagcagtagagaatcggtctgcagtgtaggaattggcaggaaatgcaagttcaatccctgggtggggaagatcccctggaggagggcatggcaacccactccagtattcttgcctggagaatcccatggacagaggagcctggcaggctacagtccatagggttgctaagagtcagacatgactgaagcaaattagcatgtatgcacacactgttaattgattgctgaaaggtatggattgtttttccatcttgctgagaattgaaaattgttaacctttatattttcctttatatattatgatatagcctttaattcatttcttttgagcataatcatataatgtataaagttttgttttacagaataaggaaaaattggagaagctgaaaagtcaagctgatcagttttgtcaaagacttgggaagtatcgcatgccttttgcttggactgcaatccatttaatgaatattgttagcagtgctgggagtttggaaagagattctacagaggtagaaataagcactggaggtgagagtgttttatataaaatagttctatagtttttacttacataggcttgttttatttgtcaactgtgcagtgtaatgaggcattgaaagggttttctttttctccttaacaggtttattgagatgtaattcacatataatttgcccatttaagatttctaattcagtgttttttgttatattcataaggttctgcaactgtcaccacaatctaattttgaaacactttgatactcactgatggtcagtgttcatcctcttcaagtccccacactcagtgctaaccaacctgtaatccgtttagtctgtatggatttgcctgtgccagacatttcatattgatagaattatacaatatgtaatcttttgactaccttctttcacttagcataatgtttgaaaggtttatccatgttgtaaatgtatcaatattttgtttctttttattgctaaataatagtcccttgtatggatatactacatttattatccattcatcagttgatggacatttggattgtttcaactttctgtttattataaaaatgctgcaaggaaaattcatgtacatgcttttctgtggacatatgctttcatttctcttggacatatagctagaaatgaaatttctggtaatataattctttgtttaaccttttgaagaactgccagactgttttccagtgtggccacaccgtttaaaaattacactagcagtgtatgaaggttccaatttctccacatctttaccagtacttttattatctgtcctttgaatatagccatcctagtgcagatcaagtggtatctcattgtggtttggaatcgccttttcctgatagctaatgatactgagtttcattttgtgtgcgtttattgtttgtatatcttctctggagaaatatatatcttttccccatttttttaatgacttttttcttattatttacttgctcattttttaactagctttttttgtattcttatcattaagttataattaatagttataatttataaatgactatataaatagtcatttgtatattcgagatttgttgttcaatcgttaaatcatgtacaactctttgtgaccctgtggactgcagcacgccaggcttccctgtccttcaccatctgctgtgagattgcccaaactcatgtccattgagtcagtgatgccatccaaccatctcatcctctgttgctcctttctcctcctgccctcagtctttcccagcatcagagtcatttccaatgagtttatctcttcgcatcaggtggccaaagtattggagcttcagcttcagcatcagtccttccagtgaatattcagggtttatttccttacgattgatggtttggtctccttgttgtacaagagactttacagagtcttctccagtgccacagttaaaaattatcaattcttcagtgctcagccttctttatggtcctgctctcacatccatacatgacaactggaaaaccaaaactttgactatacaaacctttgtcagcaagttgatgtctctgctttttaatatactgtctaggtttgtcatagcttttcttccaagggataaatgtattttaatttcatggctgcggtcatcatctgcagtgattttagagcgcaagaaaataaaatctgtcactgtttccactttccccccatctatttgccataaagtgatgggtctggatgccatgatcttcattttttgaatgttgagttttaagccagctttttcactctcctctttgaccctcatcaagaagctctttagttcctcttcagtttctgccattagagtgatatcatctgcatatcagggactgttgatacttctggaaatcttaattccaacttgtgattaatccagcccagcattttgcatgatgtgctctgcatataatttaaataagcagggtgaccctatacagctttgacatactcctttcccagttttgaactagtgctttgttccatgtccagttctaactgttgcttcttttcctgtgtattctggatataagtcccttatctaataaaggatttgaagatattttcttccatcctgtgattgtctttttactctcttgatggcattgcgtgaagcactgaagttttatattttgatgttcaatttatttgatttttttttcttttgttacttatactttttctattgtacctaagatagcattacctaattcaagactggaaaggagctacttgtatgttttgactcttgtctaagagtttcataactcttgtctaagagtttcataactcttatctaagagttttacaactcttacatttgggtatagttcattttgagttaatttttgtacatgataagaagtaagggttagcttcatcttttctaagtagatatctagttgttcgtacaccatttgttgaagagatcattcttgcactattaaatggtcttggcataattgttgaaaatcaattgactgtagatatgtagctttatttctggactctcatttctgtttcattgatggatatgtctaagcttatactattttttattctgtttttttaattttagctttgcagtaagttttgaaattgggactgtgggtcctccagttctttttcaagattcttttgattattttgagctcttgtattttcgtaagaagtttagaatctgttattaacgtctgcacaaaagcagctggaattttgatagaaattacattgatttaatagatcaatttggggagaactttccctcatagcagtattaagtcttcctgtccatgaaatgtttttccatttatttaggtcttaagtttttttaaatggtgttttgtagttttcagtgtacaagtcttgcccttctgttgttaaatgtatgttcatgtgtttttttgttttttgatgctattttaaatggaattgttttcttaatttcatttgtataatgttcatttctagaggttgaaatacagctggctttttaatattgatcttgtactttgaaacctttttgaattttttaattctattttttttttttcttctctggattctatatacaagatcatgtcatctgcaaataaaaattggtttacttttttttttccatttcaatgtctttatttttcttttgtaattatcttgataagaacctagtgtataagtttttaaaaagtggtttagtttttccttttccattttaatgactttatttatttttcttttctaactatcttaataagaatccttattcctgacttagagggaatgcattcagtcttttcactatcaagtatgatgtttgctgtaggttttccatagatgtaatacagtattttgaggaagtttctttctagtcctaactttttgagtgtttttatcagggaagaatattggattttatgttaataaaatgctttctctccttttattgagatgacttgtctggtttttgtcctgtagtcttttttgtatagtgtattgcatcaatcgattggttttggatgttaaactaataaatttctgggagaagtcccacttggtcatgatatatgttaataatttttataggtgtttatttagaacctgtttcctagtattttgtatagtgattttgcttctattaatatgttcctgagggatactggtatatagttcttcttccttgtaatctctgattttggtatcaggataatactggtgtcatagaaatgaatcgtgaattcttatttctgtttttggaagagtttgtaaacagctggtgttaattttttattgaaagtttgaaagttttcagtagtgaagccattttggcttggtcatttctttgtggtaagtattttctttactaactagatcttttattttagatctgttcatattttctctcccttcttgagtcagtttcagtaatgcatatctttctagaaaaatactcatttcattcagattatcttattgttgtctaatctaactgttgacctacaggtatttgtagtattttaatataatcctttttctaagatttgtagtgctgttccctctttcattctgatttaagtaatttgagtcctttttatgtattttttcttcatcactttaaagttttaaaaatgtttcctttttgaagaatccatgtttggtttcaatgatttttttttttttgcctgttgttttcttagtttatatttcatttatttccattcaactgttgtcttttttgataccctttctaatgtttgctttggatttagctttctcttctttttctggtttcctaagatgtaaatttaagttactgattagagacctttcttttttaatataaacatttgcaactataaatttccatatgagagcttccttagtgatatattaaatgtttggggattttatattttcattttcctatatcttaagtgttttttaatttcccgtgttattttgtctttgattgtcagttattcagaagtgtactgtttaatttccacatgcttatgaatttcccaaattttcttttgtgattgatttataggttaatttctgttactcttggaaaacatatcttagatgatttcagtcacttggaatttattgtattttgttctatagcttagtgtaaatagtcttgtcttggagaatttcctgggtgtgcttgagaagaatccatattatgcttttgcttagtgtagtatatagacggtagataactttttgatctagtttgtgtatagctttgtttgttttctatttccttgttgatcttcaacatagttgctctattggttttgaataataagtttatcttgcaaagactttgaatgcaagttatcataaattctgtttcaaactcaagtgctaagacggcgggaccattataaggtgactaaaatttacattatgtgaatattttctagtaaatatgtagtgcctctctatgtgcttttcatagctcatctttggttatttgcataatctttacgtggtagcagtttattttacactggagaagttttaagagagaacccaaagatttaggtgaaatgtttccttacagatctctccagaagttaaatttttctactgtaatgagtatgctgaagggacagttttcaactttagtggatattttcctgtgtttgtaaagctgatacgttttaaatctcatggaaatgaatatcttgctttttttccttggtagaacgaaaggggtcttggtccgagaggaggaattctagtattgttggaagaagatcacttgaaaggacaacaagtggagatgatgcttgtaacttgaccagctttcgacctgctactctcacagtaacaaatttttttaagcaggtattgttctgtcatggaggaattctagggggctacttgcacataaatttttcttgactccagaaaaatcataattgtccaagtagcacatgtatatgtaataattgattgtgctttcaagaagttaaaaaagcattaagaataaaaagtataagaaaatacctgttgtttttataagaaaaaataattaattttatacctgttgttttatcatatttatttaaatattgatattgactagtaatgcttcaaaatcagtcatctgcatctgtatcctatttcttaattttaatattttaacttttcttaagcattgatggtttatgaattttcttagtcaattaaacttggtgggattatgtctatcctcaccacccaagtttttttttaacctgaaataccacatccatggtatatggaatagaagtttcaggctctagtagtttatttttgtgctagaattatttttataggtgagtttataagtttaaatagttcttgatcaaagatattttgttctttgcaagtatattttctgtacttcaacttgtgagtcagatccatagttttcaaatgctggtcatgatccattaatggtgatataaatttagtaaataacactcagcttaaaaaaatgaaacaagttgaataaaaaattaatagtgcattgcacttcatgaagttaagtattgcttcagtaggcttttttccctctaagttttacatgtgtgcatacctgtctgtatgtccttatgtgatgtgtatgctactggattttgatgtaaaatgaattttatactctgaattaagatcagaaaattttggaagtctgtctaaagtaaccagataaccagaactataataagaatgggggaaaatttgtatttgtgtgacacactgttgaagggtaccatgcatatattttggagcagattaaaggaaagggctaagtattgtctcaaaatttctcctactgaggtgttactctaaataggaagagaaaatcctggctttgtgacaccttgtaacttgagaagacaaggtgtttagggcaggttgtgttgtgatttgacaggtagtaacctacttgacagagaaggcaatggcaccccactctggtacgcttgcctggaaaatcccatggacgcaggagcctggtgggctgcagtccaaggggtcgtgaagagtcggacatgactgagtgacttcactttggcttttcactttcatgcattggagaaggaaatggcaccccactccagtgttcttgcctggagaatcccagggacgggggagcctggtgggctgccgtctgtggggtcacacagagtcggacatgactgaagcaatttagcagcagcagcagcagctacttgaagcccttttcacagttatgtatcagtagcattcacaggcagctgctctgagagactcaaatggagaacaaagccggtgagaagtgtctgaagtggtaagggtcttcttattgtggtaatagtgcaagaaagagtctagaaaacgccatagtgttacttggatgaggtaataggccaaacttaactgtggaaagagggcagtagctgtacttgttacttgtttacttgtagctataacatttctctttttccttcttcaactggagttccacttctgccactatttcctcagttcctttttggtttaattcagcctactttattattgaactgctattgtaatcttaaatcaacaagtcatccaaccacccacccacctgttgattcaacagatgctttttgagcattcaccatgtactgagcatcaatccacccacctacctacttatccaatacatattttttgagcattcatcatctacagaaccctattgaagactagtaactgggaactggaacaaagtaattataaaaaacttaaaaaatgatggcttctggatatatggagaaatggaaaacacacttttgtacagttctgtaatttttagcttaacatgtatgatttttataagcatttttataaatagcttaaatactgtgtatcaggcaagtgcaaattaagtaaaaaagcagacattacaagtttaataaagtagaactcaaggtacaagtttctcctaaataagatacagaaggcaactttttttctcattttgtttttttaattgatgagtgattactgtccatgatttgatatagttatcaggagtgtttatgtacagatttgaaatgtgtcaggccaatatgattagaaatgtagaaagatttaaaaccaaaaattaaatccatgcattataaggataattgttctattgttgacaggtatagaagttatatgttgcttcaggagcacatagcagtgaacaggcagtgtggaggaatgagtgtcagcctggcttattcatgtgtttggagactgataagagtcagttgatctagaacttctgctgggaagactgaaatgattcagactttttacatgttgctcactcttaacatctagcaggccagctgggtcgtgttcttatggcagtgacaagttccagagaggaagcaagcttacttttgcaagcatttttcaagtctctctaaaatgtttgtttactggttagaacaagtcacatggccaactctagggaagggaattatgtcccatgcagcaaaaggcatggaaacggagtaaaaagaatggaagtcattaatataattggtttaacaagttaagtagacagaaatgactgagtcttgagataatctgaatgtattctaaataagggccatttaaatttaaagatctatattaatttctatactcaaaaggagagaataaactgtttcggtgactgatagaacatttataatagtttagtcgtatattaggtcactgaagaaatcttcatgaagtcaaattctctaactataactcagtaaagctaaaaaccatttatacaagtattaacaaatatttctaaccacttagaaggtaaaaatcactatttaaaataatgggataaaagaagatcaattttgtatcctgcttagaatacaatagtgaactactgggatctggctcaggtgaactcacagtaataaaggagccttaaatatatttattaccaaataagataaaaagatactatatgaactatgcattaaaaaaataagatgtcaaatgcaggaggtttggattaataaaatctaaagactgactcttaaataaaagaaaaaagtcaatcactgcctattttaactgaaagaaaaaaattacagtaaattggaaattctttgttaattagacctggtcttgttttttgtgtgtgtcttcccattgattgaggtccttttagagttttctttttagtcatattatcaggatagttatggttttttttaagtgtagttttttctttctttgcattttcaagtttagccagtgctctatattttgcttttaagaaattgggcaatataaacttgcaaagacaaatgaaaatgcaagtggaacaaatttaaagacaagtttaaatttatacagatttgaaatgtgtcaggccaacatgtacatatacacacatatatgtcttttctgtctatattcatatttttcttcatctgcttctaacttgcattgatttttctatattttggaatgccctgtagtaccttataaacgtagataatgagccgtaaatctataaagttaaaacatagatagcagtattatagcttaatacaacttaaaagcatagaaagaaaataatttagcatatttatttttaatcataattgtgttaatttaacttttcattcagactaaattgaaggaagaggggcaggattaattaacaggcaatataaatttattttcagtgtactatatttttttgatcaaatactttttcctctatttttaatattaggaaggagatcgcttaagtgatgaagatctgtacaagttccttgctgatatgagaaggccatcttctgttttacggcgactaagacctattacgggtatttaaacatttttgtgtagacatgatgacagctattatcattaaaaactgtattttttgtaacaatgtgttcttttttctcatatctgaccataagtctcttgtgctcaatacctgtcaatcttcttcattttactgttctactctcatgtagtctaacagtttggatgcaggattcagtacctttgataatttgagtactgaaatgagaataatgaataatactgtggcttaacattattttctagagggaagaaaaatacatgtaatggcagatattcagaaataggtttatattgtgatcagagcaaagtattccagagtaaaactattttgaagtctaccaagtttgagcaaattccgggagatggtgaaggacagggaagcctggcgttctgcggcccatggggtcgcaaagggtcagacatgactgagtgaacaaccaagttttgtttaaagggacacttctcctgtggcccagtggtaatgcaggagacacaggaaatgtgggtttgatccctgggtcaggaagaccccctggaggcgggcatggcaacccactccagtattcttgcttggagaatcccatggacagagctggagggctatagtccctagggtctcttaagagttggacatgactgagcatgctcacaaaagtttaagctacatcatttaatctttgaaatgttggcttgtttccctataagattcctgtgtttttttttttcttctcctttgcctcttccttcctttccattcattcattcagtaagcatttattattttatctttttatatctgtattagtagttttagatttgatatgatgaaataatttagaggtctgaggtggtagcagttttggtttctttccaggcttcttgaagaaataggatttaaatccttcccaaaattcttcagcatgaggttatttattatttttttttattttatttaaatttttttattggagtacaattgctatacagtgttgtgttagcttctcctgtacaacagtgtgaatcagctgtgtgtacatatatccctgcccttttgagcctccttccccctgaccaccactatcacagagcaccgggctgagttctctgtgttgtatagcaggttcccactatgtgtttacacatggtagtttatgtcagttcagttctctcagttcgtttcaccctctccttccctactgcctcttccacgtcacatgtctgttctctatgactgcatgtcttttcctgccctgcaaacaggctcatctgttaccatctttctagattccatacacatgcattaatacaggatacttgtttttcttcttccaaattacttcactctatatgacatgtttacattgtttctataatgtatttttgtatgcagctcagctgaagatagacatttctcctgcacctgaaaatccccattactgcctgaccccagagctgcttcaagtgaagctctaccctgacagtagagttagacctactagagaaattttggagtttcctgcaagggatgtctatgttccaaacactacttacaggtaatggcattttaattttggagaattcctgaagtaaggtacagtatgttctactattaatatacaatgaaagtcttgcaaaatcctttgtcgctttgctacttatttcatttcttatttcatgattttactaatagctgtaatgcatttagctcttactgtgtaacaggtctgttaattaccttacatactttatcttatttaatcctcatagcttgaggtaggtattaccttcattttagaagtgaataaactgagagagttcatacctgtgttggagctagcatttgaattgtggattgctaggttaaaacatttgaacttctagttactgtatttcctcagatgttcttattagcagaatctaacattacacatgaattaaatgtatgtacctgtactatgttctaatagttaatcaacactatttgatataattctatattataagatcccctggagaaggaaatggcaacccactccagtactcttgcctggaaaattccatggactgaggagcctggtaggctatagtccatggggttgcgaagagtcggacttgactgagcgactttgctttcactttcacttttattactcagaatacttgacatgaggttgttggataggattttagactgaatgctgcataactccaggggtaccatttacatgttctctgtactaatgaggctccctttgtgaatgctgagaccaggacttgacatgtctgttgtgatatccagcagggcacctcagacacaaggttctgcctcaacttcctcactttagtatatttcaccacctacccaattcctgaggcaaaatgtttggaatcaaaatgatttctcttcttttctcttcctacatttctcctccaagaagttttgtaggctctgcttcaaaatgaatcccaaatctaatgctccttaacctcctccacctttgaaattctacttgtcaccatccagatcagcactgtcaaacagaaatataatgggagccacatttgtaattttcaattttatagtttctacactaaaacaataaacaagtaaaattaattataatcataggttatttaatccagtatatctaagatagtatcattataccatatagtaaatgtcaaaaattcttttgctttttgccactcctttatcttcaaaatctggtctgtattttatacttaaagcatgtttcaattcagatgtgctacatttcaaatggttgataatcaatagaactagatactagaatactggataggtgctgatctagaattttgtgtacatttttatatttgatcctcttctacccatgcctcagtcagttctcaacatttgtagtcagagagattttttttttttttttcacttatttcttcagagagatttttaaaagatataaatcagatcatttggtcctgtgtcttaaagtcctccaatgtcttctattttaaacagaaaaataatgaagactataagactgtatgatctagctcttgcctttctctaacttcatatcctactaatctctatcttgctcattttagcctcaatggcctttttgttcatccttgaataaacaaaattctgcccaagatttttttatttttttcttttctttgcctgttgtgtttttctccagatcgtcacatgacttgattccttattcagtcatatatctgtctacttaaaggtcattctcatcaccctacctaaaagatccattgcttctctcctccagcttctacccttccttatatttatcattatctggcattacaatatgtattgaattgttacatgaatgtaattactgtcaagggcaagggcttgtctgtttgtttaccactttatctccagcatatagaatagtgtgctagcacatggagagtacacagtaatacttattaaatgttttaagaaacacgacactgtatagtgttatgaatgggatttagagtcgcacagatatgggtacaatatctgactccactgtttactgtttagtagcttagaacaaatgacttagtttattggcactcagttttattcaaatgtggggatgataatacctgtcttcttttgtgagagtatagagcacaaactattgcatgtaattggcatttaatgtgagtaaaactcctggaatataaggtaaattttatataaactgcttttaaaagaaacatgtgtaaaaaaaaaacaaaaaacaccaggtttaaagaaaaagaaacaggtgatacaaatattctcctataagttttcagttcagttcagttcagttgctcagtcgtgtctgactctttgtgaccccatggactgtagcacaccaggcctccctgtccatcgccaactcctggagtttactcagactcatgtccgttgagtcagtgatgccatccaaccatctcatcctctgctgttcccttttcctcctgccttaatctttcccaacatcgtggtcttttcaaatgagtcagttcttcacatcaggtggccaaagtattggagtttcagctttagcatcagtccttccaatgaatagtcaggactgatttcctttaggatggactggttggatctccttgcagtccaagggactctcaagagtcttctccaacaccacagttcaaaagcatcaattctttggcacttagccttctttatagtccaactctcacatccatacgtgaccacttgaaaaaccatagccttgactagacagacctttgttggcaaagtaatgtctctactttttaatatgctgtctagatttgtcataacttttcttccaaggagcaagtgtcttttaatttcatggctgcagtcaccatctgcagtgattttggagccccccaaaataaagtctgtcactgtttccactgtttccccatctatttgccatgaagtgatgggaccggatgccatgatcttagatttccgagtgttgagttttaagtcaactttttcactctcctctttcactttcatcaagaggctcttcagtatttcttcactgtctgccataagggtggtgtcatctgcctatctgaggttattgatatttctcccggcaatcgtgattccagcttgtgtttcatccagcctataaattttatatatattttattatatataagtgagccatggttggtattgaacaacttagatgttatcaaccctatctcttatctagtatatgactcatgtaaaacattcctaacttgtatgtatctatctttcttctacttggattatttcagagacaggggaaatgaaaattggggactttgaagggtcttttctttcattttcctatttatcttttaaaatttatttacatatatagattttaaacaaattatatgagtgtacttagagtttgtgccatcaggcttaacgttaaaaacagaggtccttcatcttgttggaaccatcctttccccaccttgatgtctaatctttattgtcagtcactgctgtcaatagtgactttatggtctgtcaatttttgctccttcttttgttgttttactccttgtttttaaataatatggtcatgccgctatttcttgattctcttttgatttaaaatacctactgattgctatagaaggtgaagatttaattctgataccctcttccttaagaaaatacatacacttgcataaactttggaaaaaaaatacttgtcatctctgtaaagcttcttgcaatacagtaaaatccatcagattatttcctctcttgtaccttccttagtccctttgcaactaaactataagttagtatggcaggggaagttttcaagttacttggcttactgtagagttgttgtcttggagcctgttggcaccattttcctagaaattctgtttgcatttgttttgcaacggagttcttatttccgatgtattttttgttcttggtttactcattatactgagagccttcagtatctcctggattaaagtgttggaaagtacctgccacatattaaatgctcgataaaagttagtcattagtgttagatttagttgcttatttaaagataaacagagccttaaatcttttaggttgtaggttattgctttgtcaaataaacgtaatcatgttgttagatgtatgattgtccttgggattacacatatgaatttagaaaaatagtttttatgtttgagatggaatcctgattttatattttctaaaatgtcattgaaacctcattttataaaggcttactagggagattgttaatcttattttcatgaccttgaactgcacatttcacaccagttgagtaattttgccctgtttgatttgccatgaaaacactttggactttgataaaaaggccaacatttggttactttcttttccattttcagaactgtgttggatgatcacttagtagtaaatgcataagcacagtgcttgttgttcttatgggaaaaaaaaagacatttgattattctaacagaatgtggaatatgtaacaatatatttggaacaggctttataaggaagtaattagatacacaataaatactgattcatgaatgcatttttgattaatgaataagttaatcaattaccatgagttatgctattaggaagaaaaagtacaagcatgaaaacatgctgatgctagattgacagtgtgtcaatagattatactacagtaagtaaccctgacacaagaaatgtatatacttgttctcagtaaagtttatactagttcagtgtaatctcttggtatagacattttgtagtaattcactaaaagcaagtaaataagctctctttggtgctcttgggatttttgctactgtttttcactattttagttttaaaatttgctagatttattttttctgtctttaattgctaagtgccagttgaaggggtccagacagtgatgctgcaaggtttcagagaaaagcctccatttactaggatatttgtggaagaagtgagattatctttgctttgttgtggttcagttgcttagttatgtctgactctttgtggctccatggactgcaacatgccaggcttccctgtgcttcagtatctcctagagtttgctcagattcatgtctgttgagttggtgatgctgtctaaccacctcattctctgctgtcctcttttccttttgccttcaatctttcccagcagcggagtcttttccaaatgagtggtttccttgcattaggtggccaaagtattggagcttcatcttcagcatgagtccttccaatgaatattcaggattgatttccgttagcattgactggtttgatcttgcagtccaagggactctcgagagtcttttccagcactgaatttagaagcgtcacaggaggcagtgaccaaaaccatcccaaagaaaaagaaatgcaagaatgcaaagacaacaaaaaaaggttgtctgaggtggctttacagacagctgaggaatgaagagaagcgaaaggccagggagaaagagaaagataatagaatcttattaggattttatcttaaatctaagaatcttaccttaaaattgcacatgaattctcttttctaattcataaatccacttaatataaaaatagttatttcctccctaaaacgacaaagtgatattcctgggagatgtgtcatgttaatcccatggacttgcatttgtcatttagctgtgccctcttaagaatgtgtaccccaattagaggcacataagcctacaaagcaagatccagatctcttccaggtattcagggtttctaaaacctgaccccaaaatacttgtttaaccatttcctgcctaacacaaacccttggctctaatcaaaattatttattttgaaaccccactgtatactttcctaatgccattttgttttttctagaatgcctccctaaacctttctgcttggtaaggtcctatatatatttcaaggtagcacaggaagactgtaccacttatattatgacatgagagctgtgtaattaatttttcttaaactaggttatcatatgatgataggtctccctttagaactggggttcttagtaccctttgccagtctgtgaatcctctggaagtatggtagtgccattaaggtatataaagaaatgaggagaatgtgaaaaaagtaaaagggaggaccagcagaggcagtaaggttttgatggatttgttatttaataagttgagtttgaagaggctataggatatcaaaaggagaaatggcaggtggcagtggaagaaggagaagaaggttaactggagagagagagatacctgagttgggaaatgtattcatggaaaataaatgaatccatgagagtagatagaatttctgaggtctgaatagaagagatgtttgaatattgtatgtgggtccacagtgctaaatactaggaagaaatagggcattaaagatggactcagggacttgcctgtcagtccagtggttaagactctgcattttctactgcagaggaagtgcagaatctgcatgctgcgctggctcagccagaaacaaaagcaaacatggggagtagtagtactgtggaagcaaactaactgaaggtcaggtttgagaagagaatattgctattagtaaatagtaaagaaatcaaagggaatgtggactgagaggtcactggattgacagttgtgttgatggtgcaattagaacccttttgggaaattagtgaggaccgaggacataattttgtgaagcataaagaaaataatcctttctctaacagaattctctctcaatctgagctttatatgcaggaaaaaactcagtattcctaaaagaaacaaaatgcagcacattgtatgagaattttaaaaaattggaaaacagagaaaaaattgttatattaaataacattattttgcatttgaaagcttcctacttttgggggggaaaaaaggccattttggcactcttgctttcaaaggtcaattttgacagcttgaatgtggttctgaaaatgaaaatgaattcctgcctttattcctttgtatgttttggaacaaaatatttatgtaggatccacatagatcataaatatttgaatgtgtcatatactaaaaatatatattgaacaatttaaaatacctaatggtgaatatttattgattaatgtgagtcactacataacttggacacaacaactgtggaaaatttttaaagagatgggaatatcagatcaccttacctgctcctgagaaacctgtattaagtcaagaagcaacagttagaattggacatggaacagtagactggttcagaatgggaaaggcgtacgtcaaggctgtatattgtcatcctgcttatttaacttatatgcagagtacatcatgcaaaatgccggcctggatgaagcacaagctggactcaagattgctgggagaaaatatcaataacatcagatatgcagatgataccacccttatggcagaaagtggagaggaattgaaaagcctcttgatgaaggtgaaagaggagagtgaaaaagctggattaaaactcaacattcaaaaaatgaagatcatgacagccagtctcatcactttatggcaaataggttgggaaacaatggaaatcacagcagatggtgattgcagccatgaaattgaaagacccttgctccttggaagaaaagctatgaccgacctagacggcatattaaaaagcagggacattactttgtcaacaaaggtctgtcctgtcaaagttatattttttccagtagtcatgtatgcatgtgagaggtggaccataaagaatactgaatgccgaagaactgatgcttttgaactatggtgttggtgaagactcttgagagtcccttggacagcaaggcgatccaaccagtccatcctaaaggaaatcagtcctgaatgttcattggaaggactgatgctgatgctgaagcttcagtccttttgccacctaatgggaagagcccactcattagaaaagaccctgatgaggggaaagattgaaagcaggaggaaaaggggacgacagaggatgagatggttggatggcatcactgactcaatggacatgacattgagcaagctccgggtgaaggaggtgatggtgaaggacaggaaaccctggcatgctgcagtcgatggggttgcaaagagttggacatgactgggtgactgagtgacgatgacagactttggcactatccttttttccttttttaaaaaaattagtctttaaaaattgaatttaattcaagattttatttctctttgatgatttttttagaaacttaaaaaaaataaatactgacaaaagatattatggtcagaatatcctctaataatccttgagtatttagaatttaaattatttaaattagaaatagcataatcatactcctattagatgtcaataaagaactacaagaatgtaaatgtctgtaatgtagaggactcagtctttaatgaatttggaaatgttaatattcctcagactgtttgtttaatcattcagtaactttttatgattcttaattctctttgaaaacctccgaattagtgttagactcacactgtgtccaagggaaataaattattaaactttaatttgatgtcacaaacacattctttcttactgtattttgacaagatcaccttaaaattatttgtttttcacaacattaggagttaaaatatgtatagagtccagactgtatacagtgtgggagaccctggtttgatttctgagttgggaagatctgctggagaagggatacccactccagtattcttgggcttccctggtggctcagctggtaaagaacccacctgcggtgagggaggcctgggttccatccctgggttgggaagataccttggagaagggagcggctaccctctgtagaattctggcctggacagttctgtggactgtgtagtccatgggatcgcaaagggtgggacatgactgagcgactttcacgttcactttcaggagttaaaatatgtatagagtccagacaagttaacaaataaggtacagtgatacttgatatttaaagtcagtatgacttagcagttatgatctaccatatttaacagtgtgagcctatttcaatacagtatttcatcctgcttcattttgcctcataaataaagcataccgaacatttactccaaattattttgttgcaaaattagtatcaattttaaaatccatgttactgattttcacatgtagtgtcaacttatttaattttagttttgaaattaatattacatcatttaaaaattgtacaattattgtttatatttattcaagtttagaattttagcaagaaaagtatttttttaactgaggaagttgtgcagttagctaacatgatgactgtaaacataaatttttttttatgttgtttatttagaatggttatttgaaatttcatccattggttaaaatttagaatcagattctaaaatttgattcacacatcacaaaatatatgaataaatgattgtcataaaattttgactgagaataaatggtgttctttgaagtgatgtgatgatgtttaatattaagttggtaggggctttaatataaagaatttatttctaagtcttctattagaggtttaatactggatttctaagccattgtaatatgggatgagtttaatgtttaatttattggcttttacatttgcctcagttcattcataattttctgaatctgatggatgtatcagcattttggttgctttgatggagtacagccttccatcttgagacttccagcatattcctcctttcctctctggcttagcttttgctcttggcttgttgtatttaccatttaggttgttttccccacatacatcatggcaccaccagcctcctaaaaaggatagatacacagtttaagagatacagacgcatatacagttgctgttattatatttacctggtgagtgcatctccagttatatgcatagtttccaattttaaatgatttatgtgtctcatacatctgatcaaaaataaaatatctgagaaaggttagaggtgaaatgcataattgaactagagtcaaattaccacatatgttatgagacatttacgtatagagaaaatgtttactttggatgcatattttaaagagttgacattgaaagatattagctattactctggaaagatactttgacgatatgaaaataaagttttgatattagaaagaggatacctgaattactttctggacagttgaaatgtccttttgctttgtgatcccatgtagaaaacatcaagtctttgtgttctggaaatgccttgggcccattgccagcaatctcagctagatgtagtgtatagttggtttcatgatctcccaagtgaaaagagtattcagcataatacttgtcttcccagtcttccagctcgattcgcaagatatagttagattgctttactatggagtatatcttttctaaacccaaccaaaattctcctgaaaaaaaaaaaaaaaagttgcagaaatctgtggattgttaactgtagttgaggcagtgaccgtttattttgagagtttttgttttaattttttcgctgtaagtagcttaactgttttcatcttgaatcctttagagtttcttaaaatatttgttttaaaagcagttttattgaagatagttatattacaacaactgtgaaaatattaatgggcctacctagagtatgattatcctttctaaactggatattatcaggtatatttcacaggtgaaacctattagactattataagtatttatagggttggtcattggtaaaatgttatctaacttttgggtccttatgtatactggctttataatcagctgggtttttttttaatacccatatactatgaagagatttttaagtatttctagagacttggataataatgttattttcctctcacatagtcttggcctttgacattttcttggtatatatattttccttgtagaaaaagaaggaaataaattaaaaaaaatttaaataaaaagcattattcttaataactttttgctgtagtttaaaaaattttatttggaatgaaaaccataacataaatacaaacagttctctttaattaccacaattaatctctctttaattaacccttttattaaagaatttaagggaaaaaagtcagaatttctttgctgctgttgaatcagtatatttcattttaagagttgcaaactacaaatatcttacttccttgaagaaataaatgagtattctggactgtcactcttaggagaagacttgagcctacaaagcgtatcagtgattataccttttagtttgggatttaattggtagtttgaatctaaaactgtttaagtagtcaaatagtcttgaatatttaaaaacttgccataataatggatgttacccattttatgaatgagtacatggcataactcatggatttttataatgtgctttttggattttaaacccatatcttatttttaattagcttattttattttttagtttatttattttgtgatcaaaatataataatttgcattgaattacctaaatttattttaaaccacacattgtataatatacgtttataatatttaaataattgaaatctaaacattttctttagatctgacagttgacagcttctttgtaccttccaacttccaaatagttgatatctaaaatgttaataagaaagcagagtgaccactgataaggatggttttctttgtagctcattcatagcatttactacttatttgaaacatatagtactttaaaatcaaaattatcttttaaaatcataattatgataatcagaagccatccaattaaattgtgctaagtatatacatagaacagacatgtaattatggaaagtataattcagaaaaagacaattgtaataagttcagtacttacaaatgtgtaactatttgctaataatttctaagaaggctgggactgtacctcattcattgtatttctaatgccaaatccacaatgggctttattaatagagtcttaataaaatacgttttagttaacaagtgaattaatgtatgaagtcatcttaccatcaagtctcccaaaaccatacttgtagttttcccaggtttcattgaagttttgtgatccatctattcgctgttgaattaatgtccatgaactacctgaatataatgaacaaattgtattttcagtagactgatgctgatagttgtaacaaaatactgttttttttgtttggtttttattggtggctgtataaggtagttattaacattgttatggtaatattttattatttattgtgggcccaagaagttaaatgaagggcaaccaattaatttgtcttaataaacttattgacagcagtcattttagataattttttagataaaaggatggagaacattgaatgaatgcataagtaaatatataaataagacaaatgtatgtactagatctagtacacatatatgtactaggtacagatataaagatatatatctgtactagatacagatatatatccttcactttcacttttcactttcatgcattggagaaggaaatggcaacccactccagtgttcttgcctggagaatcccagggacagaggagcctagtgggttgccgactatgggcttgcacagagtcgaacacgactgaagcgactcagcagcagcagcagcagcagcagcagtcttactaataggtagtgagtaaccttagcttacttactattgtgtatttgtcttaggctggttttacctgatttaacatcacagtagacattaaaaacttgagagttgctaggtctaatggagtagatgccacttgtatgtttgccttggttataaatgatggtacaatcagcaggaatgtctagaatcaacaaaatgttattacataaggtgcatttagtaaagaatggtatctttagagcttgagattttagttgaaattctatggaattgtgactgtcgtctttagccttttttagtaatgtgttattgaaaaactgttttatgctaaaacatttttattagatagcatgttatatgaagaatatcaaatagttattatcaaactgatttctttttgagaaagcgacaaaatgagaattttaagtgccctttcccctagacctaggaaaaacataaataaaattccacgtatgagatattagtatagtgcttggtgggtactaggttgtcaacagattaatgtagaaagagtgaacatatatagaagaaactaacaaagaactttttttcctctatgaattacattaaaaataaatgtgttttgaacatatatcattttgttgaagcttggttgagaatggagactttgtctccccatctttttgctttttgtatggaaagtagaaaccttgaagagaatgccataatctttccatgcatattcaacaattgttaatattttaccttattgctttataaacaaatatgtacaaatatgaattttattgtgctatttgaaagtcatttgcaaacatcatgacccttaatcccttagatactttggcatgcatctcttaaacgctcttaaacatgagattattctcttacataactgtaatatcattttctatctaagaaaattaatgattattacctaatagcaagtctatattcatatttctctgattgtcttaagaatgttttattgggtttaaaaaaatcactaagatccagtttaggttgacacatatttgttgaatgtatctctttactctcttttagtctagaacaggccctgagaatagggatttttaatggaaatgtcaaagatagaagaaaaatttgatagtaatagcttcaagacagaaacacagcaaattatcttaccgtcatgttgtacattttttgtttcattcaagtgaaaaaagggagtagttcttggtgctcttggtttagaagaaagagaattttctgtggattctttaataccagttcttctcaactgataaaagaatacaaatctacttttaaaaatttgaatatttaattaggggaaatctgagttcataatatgttattgttttcagtggtaacagggataaataatgctgtatgtattatacagacttcctgttctcaaaatatttaatcaggcacattatttaatgagtttaaaaaatagagaaagatatcaaggcaaaaaacagaaattgatcaaaaaacagcaagaccaaaggcagagactttggttaaagtattttaatatgttctatttatttatatgaatgtaatatatattctgttcagtgacagaggcagatttcaaatttcataattctcagttgtaggtcttaagatataataatagtaatttgagcaaggttgctttcttgatagtttttgatatgtaaatgtatttgtagaggtagcaaattggcaggtttatttgtttgcttttcatatattcaatatttcattgtctgttgtgctgggtttgcaatttattgactgatagtttgtgttattgatgacttgagaaaagcagagtatgtaatatcttgtgttaataatgttagttttttgatgtcagcataaatggcatttcttaggatataattcactaggctctcttgtaaagttcacttattgtatgtttgtcttttctactgagtgactgtggtcttagaataacttaactttagagtttggtttgtaaatttaaatttgagtaagttgtgtcagatgatctaaggcttcttccaacttagaaatttattgttttaaattcttcatacattttattactagacaagatgtataccattttataatagtgacattttgcttttgtaagtaggttcatttactcatagtaaaatatgtaggaaaaaagagaaaaataacatacagtaagaaggaaattgtggaaattaaaactagttggaaaaaacccctttttgacaattagcaaaaataccctactaaataatgattgataaattagcaaaagtaagttactaaaattatgagtcataaaattactaaaacataatgtctttgttttgtggaaattataatatttgttttatagtccttggcatctattttttttagccagtttcttcaagtctatattatttttgaaatttctgaatggctgtttaatagcattattactaattaatatttttgaactatggtagtatatatatattggaatgcttagattttggcatggctttattctaaacaggtatctcccttcctcacctagccagttatttatattgtagattaaattatactgttgggtattaaactttaattattaggcatgtagcttctaataattataatcacagcaagtttttattgacttgtttgtactaaatgtgacattacctttattaactcagcatgtattgattaagtgtttactatgtatcagacagtgttctatattttggggtctacagcaattttaaaaaaaaatgagaaacttctgtacatatggatcttacattctagtgcagggacagacagaataaataactaaatatatatattatattaaataaaggtaagtgttaagagaaaaaagagagtgatgaaagaggtagcaggtttcaagcacgggtgtaggggattgtaacttctgattaaattatctgggaaggattctttgaggattttgtatttgagaaagacctaaagggaataagaatgggccatgctaataccaagatgaagagcattccagacagagagccacataggcaaaggccctgaggtagcaacttgtttgatgtgtttgagtagcagtaaaaaggctagtatgactatagtagaggaaatgaagtcagtgagatgattaagaatcatctgagtctttttgggccactgtgagtgagatgtgaagccattgtggggtttcaaagagagacatagtgtaatttaaattttaaaggaatctctttggctgctatattgaggatatactttgcatgaattctttcttttttctcacagccatcctataagacaggttctcttattgtctacctagagtatgtgaggaaacagagagggaggaaatagagaggggttaaataatttattcaaggtcacacaaaagttttagaaccaggattcaaacccaggtagtttactagcttcagagcctgcaaacttaacagtcatgctgatgtgatccttttattcattatccagctataattattgtaaataattttagggtctgtattttcataaaccttatttttatgtaaaagattggacatactattaagatattgacttacctgattttctatttcttttatttgactttgctgttggtttaactgtctgtattgttcttccacaatctgaagaaggtctttaatgctattatcttgctgttctaccaaagtctggatatagattgtaggttggttagagatttctttctttcctattaaactagacttttaaatttcctatagcactgtcacagtctaattttttaaactaatagtatattagaaaaatgaatactggcaaaccttttcccctttcatgcttctttcacatagcacatacttctgtttttgttttttatttaaaccgtaccatctctaaaatctgatttcctgaactttaaactacttcaattatatggaggaaaaaaacctccagcattttagtgttttccatttactgtattacttttataaattttaaagataaaatcgttacacaagttatattcctttagctttttacttgcctccagtaattcacaatattgtaatagtttagtgttctaaatttcattgcttaactgacttgtaattttcatctgatattcaaagttcagttattttcataaatttgttagggaaacaaaaaccagcttgaaattatcatgggaaaatttatttcctggaggctttttttaaaaaatgagaaaaatacagtgtttcagcaattcaactaagtatttcaagtagtatgtcttaaaatatttttttgaaaagatccacattgaaaacttaatcatgctctttagtttctacttactttaagtgaagttacttccaggtgttcctgaatttgaggttgatttttaattaaattggttaattggtcctctaggtatctcactttctgttgcagtagaattttctcttcaaggagactttcaagttttgagtcgagttcaagtgacatgttctttacttcttcatttttgacttgtagtttggatgtagctcttctaagttccttttcttcttctttgatttcattggtttgcagtgataagtcataaaaggactgatcaaatatgttgagtttttgaaatatgtcattaatttggcccttagtcttgtgaacaaagtctttaagaccatgtcccaactgaagtaggccattggctaaaatttttacatcatctaacatagcaaatcttgattttggctctggagatatagaatcaagtgatgtatagtcttggtcagttctggaagaaataactagaggagcaataaaaagaaagagcttgatagtgtacatttttatcctaattactcactttcaagcgatttggaatttgtttttttcctgggagcataccaagacttctgaactctctatataacactatttgccacagacacagtaaggttggcaggtcaatatagttaatcattaagctgtgtaaacttgtatgaatgtaaccttccagactgagttagatcaatgctaaatgaaatcaaagaaatgagcaacaaccttaattgattatttaaagtggttattgtatttaattttgctatattgtaaactgcatttttagtgttaggagatctacctatttttaaaagctcattttaatttgtcatgatttttaaagagatttacaagtaaatatcaaactcttttgacagataaattcatcattaaagctgaggaaaaattaatgaatcaagtatgcatttcctaaattgtattttagtttttttgaaacagtgatgatcctccaaaatatgttctctgtgaagccttcctccacatctgcaggtgatgttaatgctgtattcctatgctactctgtttgagctaatgtatggttatttattccttattatttgtcactataattatttgtttgcatatttttttcttcagatgatctatctaaaccgtgtttgtatataatcacaaaatcccatatctaaaaggtatttcatcctttttctctgttatattctctgtctctgtgttctagcctctttcccctgtacccactggaagaccaatagattatgtggttccagtgtcaagaattatttgcccattataaatttttctgtagtttgtgaacttgggaacaatattcatgatctaaatttaataaaacctttcttttgattatttagccttaagggcttttggatagaatggttacagtagatgtagtaacccatcgtggttaagagtttcattctggagagagactggctgaattggaatcctgactctgctgttctttagttctgtgaaattacttagcttttctgtatcccttttttcttgtctatcaattgaagataatatatactttctatagtttaaaaattaatattttaaagcacttagagcaatacctagtgtttagtaaatacaacatggtattatgtaccagctattcttttgtaattagaaagtcaatgcatttatgtagtagtacagtaatattttattgataaatattatctaatcttatgttaagatgacataaattgggaaatttttctagaatctgagttttcttactttggtctcttgaaccttggtaagtacaaggaattatttcttttgtttagcttgtgtatactttttctaagtgtccaatatagaacaatataagtatttctgtttgtaagagaaataaagaatgcaagtaaataaaagtatacaaatacttccagtagtgaagaagaaaagcaaaacattttccctttgttttcattttcattttacctttaccactggtacatgttgtgaaattatagaagtgtatgttgaactagtgaaaaaatttgaattttcccccccttttaaaaggaatatgttagtgttgtgatcattggtcatgaagagtgtgtttcgaagcttgtcttaattgaactctctccttttcttgcttgaaactattgaccctgatatttcatccaccttttagttgaggggcaattgaaatgggccaacttcttgtctctgttgtactctaagctgtttattggtaagatctgtatctgtttttaatttatattccatagagcacttcagtaaattccttacatgttggagaaacaataaatttttattgaacgaataagataatgataattcttaacatgggagtttttcaaacataaaatttgcatgtaatagatactcctttttagtattggaggttctttacaatgaaaagaatttgaaaagtagtcccttccagtgcatgaaagtaactggataataataccaaggaaagactatgtgtagaaatttctttttattttagttaatgtgctggaatattaatactttctgttgaagttatggttgtaatgcctcacatataatgctaagagagattagaggcagtggttgcatattcttggtttataatattgtctttgggtagaaatatctgggtaatttttttcttatagtagtttgacatgttatgaaatataattaaaataaataaattgtctaattacaagctgtggaagagtgtcaacatgggaaatgtaatgtgtttaaacagaaccctaaccagatataaccagtaatgttataaaaacttaaaatttttatgccaaagaaaataagaaactaagcaaaattaagacctaatttaaggattcccagtttctattaactaatactcaaaacttcttagctgcatggaattataggacatctaggatctttgtttaaaaagtgacgcaaagtcctttatcctttcccaggttgtgcaatcttatggagatttgacttccaaataaaacacaaggcattttggatcttgtatccctgttactttgaatatagtatgtccctactaattttttcctttttaaatgtgatcatttgtttttgaattaatatgtttggtagaaagactgaaagtaactgagaaaaatattgataaatagaaatatttatatgaactaatgaaaaagtaatatattagtttccttttcttctagaatagtactggccaatggaaatacagtgtgagttatttatgtaaaaaactgaaaagagatgagtgaaattaatttgaacatatgttttatgtatctgatatatcaaaaattaccatttcaacataccagtatgaaattattaattaggtattttatgttcttttttcatactatcttccaaatctagtgtgtattttatactttcaggatatgtcagttagaacaggtacatgtaaagtactgtgtagtctccaggcaaggatattggagtgggtagccattcctttctctaggggatcttcctgatcccagaatcaaacctggtctcctgcaacacaggcagaattctttactatctgagtcaccagggaagccctgtactctcactagactgtagtattggacaacaaaggtccagaaggtgagtgacctttgaaggaatcattttatttatcttagcattttttcccatgtccattaactggcattaataaatgtttaatttttatactaaaagtacttaatgtggaaacccaggtgttagaaaatctttaaaaaaataaaaatcctcactcttcactgttaacattttagggtctgtcataccagttcccttggatgactggctaaatgtaatttttatttaacacaaatgagagtatgttatatatagctcatgttttttatatatgtacattgatttaagactttaacattttaaaattcattttcatatgagtgcctatgtatttactatatccttttaagtggctgcacagtgttttattatatagatgcaccttaatttaatcatctccctatctttgatactttaagttgcttgtaattttctgattataaacaatatgcatagaaaatatatttatattcgtatataaatattttcatatgataagttcatagatgttaactttcaaagtagatttctctttgcagattatcctaaaaggattatgccggtttacatccctaccaaaaagagatgagagtttcttttttctcattaatttttaccagtattttgaatgagcaagacaaaaaatattgctaaacctggtaggcaaatatatctagttgattttgctgtctctctgtcttgctctctttgtgaattatctgagtattgcctaagtctccctctccccatcaaactccctgtcccatgtttgtttgtctctttctgaccaattttaggaattatttacatgtgatggatattaactctttgtcatctatgtaacatcagtgttcttccagtttgtcctttgtctcccacttgtgtttttggtatcccctgctctgtagaggctttaaaatttgtcttttatgattttttgtggcttatgctcagaaatgtcttccttacctatagaatatgatctctttaatgctttcctgttagttttatggttttatttttattatttaaaacttggatttaatctagaatttattttgagaaagtggtgaaataggaaatcagccttaaaaaaggctagtcaggtatctcatattatttaaaacttggatttaatctaaaatttattttgagaaagtggtgaaataggaaatcagccttaaaaaaggctagtcaggtatctcaacaactcagcactttttattgatctaccttctctctgctaacttaaaattcccctgaaggaatattacaaatgcaggataaagacttactaggttaatgtggaactttattagtggagttagtagtccaaagaatgaaaaagaatctggtctaaatgcgtgcatttcaccttcagagacaaattgaatttaaaattgtattgcttatatgagaaattaagcatagcttaatgtttagttaattcccatttcacttgaaaatccaaactccagaagagttaagtaactatttatgtgagttctgtactattcattcgttcagtcaatgatttattcataggagaaactatcctaggcattggaaatagagcaactaactagatagataaggtccttgcattcatggagtttggccttaagtaaaggagatatataaacaagaaataatacataaacaagataagttaggattattttaagcagattatttgagttgcaaatggaataacaaagtgatgtgatgtttgagagggaaagtgagcctttctaaaacttgaaagatggaaagggactggttatgtccacatccacaagctaaaacagtagtaatcagaatgcagaaattgaggggtaggaggaaagcatgatgtgttttgctgtgccgtgcttttgcctgtctatcttaaacttgcaattttctcattgaaatctgtgggcagattctttagtttttaagtccccttgtgggcccccaaagacattcagttttcataacatttattgttctgcattataattatttgtctgtttgattctccctccagacatgagttctatgaagtcaagaactcccttattttgagtatctagtatactgtctctcaataaatgtttgtcatagtgaggaattataagcataataaaggccagtctgctgtcaagtgctttggatcctgttttctctcaccatttcaggaatcttacattcttgtctatgtgtgcaaactctgtctcacctacattctttccattaggagttaatcacacttcaacctttccagtcttaaaaagcttcccgaatccccatgttttgtctccaaatatctttctcctcttctcagctctactcttcagaattttacttgcttcatttttttcgtgcctactactcttgaatcttacttttgtctgttttcagcctaaaattatcagtgacttgtgctcagttgctcagttgtgttcagttttctgtgaccccatgcactgtagccctccaggctcctctgtccatggaattttccaggcaagaatattggggtgggttgccatttcctcctccaggggatctttccgacccagggactgaacccatgtctcttgtgtctgctgcattgcaggtgaattctttaccactagtgccatctggtttgattaataatttttcctgtagtgctaaaagggtaagaacttcaagagcatacctatggtgctttacacttctaccagttatttcagaaaaaaggtaaagagttggtctatgaaagccttatttgcagtagccaagatttggaagcaacctaagtgtctatcagcagatgaatgggtagagaagctgtggtgtgtttatgtgaatttgctgaattcagttgacatttttcatttctttcctcatgtggtccctgaatagcatttgatgcttaactctttaattctgcttgtaatttctttcttttacttccatgtcactatactctcaaggttttccttctgcttctttgtaggtgactgatcagtctttgtaggctcatcctctcccggatgaccacaagatcttggagttccttaagactcctttgtttgaataacacgcaatgagtaattaaatgatactttagttctctcatagttaatgtccttggcagtgattttcagcataggaaaaatggtatagatgcaaggtagaaaagaagaaataaaagccttatagtcttgaatgtgaattatcactatgaagttaggtatatttcatgttaaaagcattctcctaactctttcaaaagaagaaacaatgagtaacccacaattagtggcctggaaaaacattttccactttataagccacagctccttggagaaatagctgattccaggtttggaaagaaagtgtataagaagaacctgaaacaagaagagcctggaattagcaagaagctgtggaagactagtatgactgaatcaaagggcttatgagccagtttgaattgaccttttcacttgtcaaggatgatgcaatttgaacaccaataaagatagtaactgcaaaatatttaaacctgttaatatgtttggttcattaatttataagtgatgctttaaaaaaattgatcccttttagaggaatgtaatgtaccaactgattattttgaaaactggcagataatggaaaagaatgaagcatttattcttgcttctcatgtaatgaatggctcaccggcaaagcaaatagtagataaggaaaagtgcttttcatagagatatttcagcttataaatatagaaacagtgatagaatattaccttttggcaacccttaatgagttaacgtatttaggcatggatcatcattatctactaattgcgcagaaagagaaacaacaaccaaacattttcctcctgatagaagatacaatatcgtttatgtcgtatccctgacgtttgtcctatcttatgacttaatgtcttatctctgaaatttgaccaaaggtctagattcaactttcagtttatagaaaacacagaggcacatgttaaatgttactacagggtgcagtcagtaaaatctagcctttggaaaaatctacacaaaaataattccgtttcttcagcaaatgccatagcagtggtagaagatgaaaagacgtcattgtgatcagctcagtatctgtctctttctcccatagctactgcatacttctctcacaacacagcactgttccgaaatgttcttgcttataggtatttccctgccactaaatgtgtgatgataccttttcctcttttgaatcttgtcatttttaacttttgacattttaagtatagtgtgtcttgatgtgggtctctgagttcgtctttggaactctctgaatgtcctagaactagatgtctatatctttcctcagattggagatgttttctgccattatttcttcacaattttccataagtaggttaatgccacgatacatcctgctttggaacctgcttttttttcattcaacatgctgggtatctctttctgcactaataaatactgctgtacattttcattttggggattctgatacgtatttgtcttattagtatgtcttaattagcccagtactgatgaacagatttctttataattatttataactatttcctaatataaacaatgtcatgagtttctttgaacacatgcatttgtacatatgtgtggttctttccttagactagagatggggttgttaggtcaaagagtatgttcatttaaaatttctgtattaccctaccaccttccagaaaatttagacctattttcattgccccagtatttgattaggagggttttattatacttgaagttctgttcatctgctgtcagcaagcgctagccttcaggtaaagtaattctcaatctttttttcttttttaaaaaaaaatcatttttaattggaggataatcattttacaatattgtgttggtttctgccgtataacaacatgaatcagccataatctattttttcttttcttttgaagccctctattttgatgctttttcttgaattatttcttatctctgtattggcagcaggtactgctaccagcagctgtgtaaggtgcaactgggcttatgtcaattgattgtagagtaatatgtgattttcttatagtagctatctaatactgttatacctaccatattgccatatgtgttttttgaacaataatgtagaatattatacctcttaaaaccttgatcacatttatacaaaatgccttatttataaatgtcatcctgtaagataatattagaattgtcttttaatttcttaataatgtttctatcctcacttgtttatttctcagaagcctcttttagaggaaataacacattttgaagtctgactgaactgtattctgatttcagctttgccacttggttgtatgtgaaaatctcttaacttttctgggcctcaattcatctgtaaagtaggggtatatttgattgctgtctgtttgaatgattactctaaggatcaaatctaacattgtatgtaaaaatagcatagtgtctgtagagcaaatgctgataattcagtatttgttcatttgtttcttttgtagtgtgtagtagtgatacatagtgttttcagatatgttcactatcatgtatactattgctttcacagaaaccttctctacatataccctcagagtctcaattttgccaaccgtcaaggttctgccagaaatataacagtgaaagtccagtttatgtatggggaggatcctagcaatgccatgccggtaagatatgctctttacaatttctgttcttcatatgtggttcaaatggtggtggcgggggtatcacttggttggcaggtctaaactggaaattaatgtgatcttgtaaaccgtatttctgacttcattacttcctgtacaggtagtaatgagtttactagaagtcttgtttattgaggacttggtatatgctaggctcttccagagatacaaagatgaataagacttgtaatttagaggatataagaacaacacatgagattcaaaaatagtgaacttcagaagagggccagatcagaatcacctaggatgctcttaacagagcacagatagctcttctctttgcttgcatctgtgattctaattcccctccttcagaataaaagggcaggtaagggaggtggaaagtggtgggcagtaaatgggggctgaaaatgctttctaataattctaatttgtatgtttcttctcaccttggttgagaacctctggcaatagttctcagctttggctgcattttacactcacacaggaagcttttaaaagtgctagtgcccagactgaatctcattccaattagagggacaccaggtggataccattattttttaaatccccccaagggattacagctttcctggtagctcagacagtaaagaatctgcctgcaatcttggagacctgggtttgatccctaggtcgggaagttccgctggagaaggaaaggcaatccactccagtattcttgtctggagaattctgtgtacagaggagcctggctggctacagtcagtggggtcgcaaagagtcagacaccactgagggactaacactttcaagggattaaattttcagctaatactgagaacccaaggtatgtgctaattattagaagattgatagtatatagggattcaaaggcctagatggtcagaggaaggagaggatgcctgagaagtggttaaaatgttttaacagtgggtctagaccatggggaaaggaagaccgttcatgctggagaatgttcttcagcggagatagaatggtgagttgccagtgagctagaacaatgcaagataagtcagaaatagtaaactgaggccagactagggagggtcttgactgcccacatggtcattaaggacttttgggacactaataaatgcaagttccatgaaagcagatttttaacttatggagtaggagcatctgcagatgttcaccctctgagagaacctttgtggattgaaaatgagctaagaacaggtgcattatttacagttttattttggccttctatgtgagtcatttgaatgaagtccttttgattttctacttactaagaaaactagtttcatttccactatagcctcaatttcatcagcatttacacaaattattcatctttgtattcttctatggcagctttttcaggtctttgcatataatgcatgctgagcaaatatttcaataaatgtagaatttactcttgaggtttggaatgagcaattcatgcttttaactagctcttcatttctgctgaaggactgaatgtaccgtcattgttaatgaaaagatactggacggtgaaaatagatgctttattatcctgtatgtgaatggtcatatgaatttgagcttatgacaaatgtagtgtatgtaaaataatttgtttttattttttgcctaacaaactcttccttgtcttagcatatatatggcctcctctgcagcatcccagctgcatccagccacattggtggttagaccactctttcttttggtgctgccatagtgtcttcacacttcttttacaggctgcttcatttatgattatatgtttatttctttaccttgtccactagactgtgagctccttgagggcagggaccatatcttactcatatctgtatcttgatgcctgtcatagtgcttgacataattgatgctcagttcatgttgatgaatgattacaaatacatgttaaatggtcaaaggaacactttccactttatttcatgcatgttatgaaagtaaattactttgtgaaaaacaatagcttctcagaggggaaaaatgtactgcattccattcacttgtgtattaatgttatgaaactataatgcttttatgtttatatgagtggctggtttgaaagaatatataaccagacatttgcttatttttgtgtttgcttattttttaaaatgactgttaaaatgggtcttaagataaattttgatcaaataacatgatatgataaaatcgtaaatttcataattctggcactgaagcaacatttttattaaaacatagtaaggtattcttagaaaatttttgaaattagacatatctaggagagtcataattattctacttttacatactcttaaaaggacctgcaaaaagaaacatatatacctgttattatgttctttttatttgaggatggtgccagttaaccccttctcatgaggagtaaactttgagttatttttaccacttgtgtgatagaagtgtgatgacctgtccacatacctattcatgcatgtgtagaatgactggccagacttaaaagtttaatttttgactagataacattgtaagcgtgccacattggaatcatagctgtgaccttgacatcaataagacatttatctagtcagctgccctaattaaccatagcatggttgggtagaattcacgagacggatatataagactgaattattttacctcaaaaatgtcgctaaaacttttagaaacatccagtctctaaaagtggtaatttttttttttaagtggtggattaaaaaaagcataagtaagaatagaagactggagctcctctttcattgtagagtagcttacagtaaggatacagagcttgaccaaaattaggatattttaatataaatcatttatatttgacatttagaattactgttgttttagtagagaagccaccgatttgtatagtagatatatgtcaccattctaggattgtactcttatataaattccaaattatgtactacagctagattttaaaatgaattctttaccttcttcaagaaaaaggaaagaaatgtaccttattgcccaatagatataatggatagaaactttctgaatgtttgaatgtcagatgggtgtgtagttgaaaagaaatttacagttaagcaattgaacttataggcacatgttcttcattgggctgattttgccctttgttctcagttattaaatcagaccaattcttacatagatatgaaacatctagcatttattacaacaaagtttcaacatgctgttatttgttacaggtaatctttggtaaatctagctgttcagaattttcaaaggaagcctatacagccgtagtatatcataacaggtactgaattcaaatatttctttcaaagttactcacttctcagtggcattgttagctctcacattagtgtgtttactgaatgctttgctgcactgaatgtgcaaattcaagacagccaacatcagagttttaaatttcaacctgtagatatacattctctccacagacatctcaaagttaagactttatatacaaaacatcttttctgtcaaattctctgatcctttcattttttattatattgttgattaccattgtggcctctggtcttttggtctctcgctgttgttttcacctatactttgtagttttacttaaatctctactaagcttgcacccaagtgcaacatccagtaaattggtgcagcatccaataaatctttgccttagtgactttccattttagttctttggaaaattgattgttaactctggataacgtaatttctgctttctttctcctcctcctttctgttcttcctcctctaccttctcctcctcctcctcttctaccatccccacctcttcccctccctcactcaccttcccctgctcctaccctaacccctcctttttctttttttttattactgggtgctattggagaaaaataaaaattgtgcccattgaggccgtcacgacttactgttattttatcacatgatgaggctacagtattttaccttctcttggccccactactctttggtaaatttagttggcatcacttttttgccctctctcccgtttggcggtggctattttaagcttttcttccccttcctgcggctcccacctcttttctgtttgctactcgtagtgttcctgccttacgaagtcgattgagaccatctaacttgatatctgtgaaaacctctatgcttttcatcccagattatctctgtgtggatctgcctttcctctgttatgaagttggtaatggtccactccctccttctgtggatcttttcatctctgctctcaaagaatcttctccagcctctgcagagtgtgactccatcagtgactcctttccttaacatcatcggccttctgctccattcgctccgtctcttatcgccacagaatttgtttcttagatacttacaaaagcaaaagtctttattcactgctgttatatagcatggcttttccttaccctccctaaagctttcttctttcttacctttattttatggccctctctcggtttacttttttcctataataattattctaatttttctttaaaacatacgccttccatacaaaacactaaaattttgcctttaaccttctttttctgtagtattctctgcctaagtaatcttgtatgtattccagaatcaccttcaatgaaaccgctactactctacctttatgtggcttgttctcactctttattttccgtcctaaccttctttctgaggtatagacgtgcattttcagatcttttaggtgtattcatttgaatgcctgcttccttcttaatttccatgtgtttattcttgactctcttcctaaaccaatctctccctgttcttattaatggtaccaccatttttccagttgctctgactcagaatgtaaaccattcttaacttccttcttaatgtctctaatccagtcatcttttacttcttaatgtttatatttctgctccattacaaacatatcctgtgctgtcctgtttctgggcctttcttggatcttttttcttttataatactaattccctctatttattgaactactcatagtttaaggcccatatcatgtatctcttcctagagacagttccttgatcccaaacttgaaataatctgttcagctcttctcttgaaacacttaaccttatatgctctataccaggggtcagcaaacttttctaaaaagggtcgaatagtatatattttaggacttgtgcaccatctgctcttttgtaactgctcagccctgttgttgtagtgcaaaagtagccatgcacagtaagttgcaagtaaacgggcatggctgtctgccaataaaaatttttaatggactctgaaatttaaatctcattcagtattttaagtgaaatattatttgtttgaatttttaaccacttaaaaatataaaaatcattttttactttgtaggctgtacaaaaccaagtgatgaactggatttggcctgtggccgtagtttgccaacccctgctttatagcatagctgttgatatatgtttgtcttacttatacttctgctaaatatatattttttgagggtttttaaaaaatattcatctttaaaaccaccgtaaaagtcacacagtgcttattagcctaatggtgggtaaataaaaatacttattgatgaataactcttagatgtttaattttccgtaagaaccttcacatactgatttcaggaaagaaatgaactgaaacactaaataccaggaaacatggagaaagaaggttgtaatttcagtttgtggctgagtctttattttgttcctctcagcattagtagaattaaaatgatagagtcgaacactactagtaaatacaactctctcataattcaggggtgattagtaagtaatacgatctatagcatcctatattcactgaagtcaaaaaattatcaaatggcaggcattaactatctttctttaaactttatgccccttacctgttagcatttttgaagcttatttgagatggaagaatatttgacgtatttagcatcagaggaaaatccctagttggtgggatggctttcactttaaagataattggagccatacagtttggatgtattttcattgtagataactctgagagctactaaccaaatatggaaggttgggatactaaggttctctctcttttaactctatatcataaatagcagtcatgatgctatttatgatataccatagaaatgcatatgcttataccatagaaatgcccatagggccactctcaataaatattgagatgcaggttctattggtttgatcagatgtgatatttgttgtattcctatagtagctgtgtgcactttcaagcagtgggacacatgcaattttgggtgttctctgattttttttttctgttcttttttctcttttcctttttttttaagctgtcagtcataactagtccatgtttttggtaacattatttctttggcaatgggataataaatacaagatagtctatagagagcccatcttgataccagattgtctgaacctatcatttttcttttttaaaaaaacagaaagataaacaaattagtcttaatataaagctgtactcctataaaagaaaaatgtttttctatggtatggttatgagatatactataaaaaacttatttttctatgtaatacatatctagattggttataaatatagaaagccttgccctagttcctctcctatacagtttccaatctaatgaagatctgagcatcaaggtggtgattattaatgaattttcaaatagtaggattactcaacccattaatgaaaatgggatgagagatttcagaaacagtgacagctccctcatctggaagtgtaggagttagttacttagagtttggaaataaaaatactttggactagaagaaaaattaagcacgaatcatgaaattaatttcaaaattactcaggtgtacaaatgcagtaattatttattttgaacacattattgattattgatctgttttgttttgtttttttgtatgaaggtctcctgattttcatgaagaaatcaaggttaaactccctgctactttaactgaccatcatcacttgctttttactttttatcatgttagttgtcaacaaaaacaaaatactcctcttgaaactcctgttggatacacagtaagtatatttttgttatttagctctttgatcataaaaataattacaatatttaagatatactttgtgtccattattatttgaggattccttatctgattttccacattggttaggaagggtaatcataacaagaagatgctcattaatatagttaactaatgtaattaattaactaacatgtttaaacacttaggtgttggtcctgattattgtatatttatccaacattactgtgtaaatataacagttttaagggttcttcagaagaaaatggtttgaatgtaacataactcaaagagacctctggtaattaaaacccctttcagttgccttagttaaagcaattaaaacccgtgagtattttttgaaaatcattgcttttgaattataaacctaagatgaatacatcatactgtgctaatcacagttttgtcagaaaggtgtgccttcacccaaaagagaaaaactaacatttgattcatattttttgtcttcagtttatgacatgaattttgctaaatgttagaaaataagtttgtcatactctttagttttattttcaacatttatgtctaatcaaatctttctttccctatttacattggcacattaccccagtttaaattgattcgctttatggcctttttctgctgccagctttcctttacctaagaaggacctactatagatttaaatattgcagagttagtaataatggcttggggatccttctcaagccatggggaaacttctaaagatgaagtaaaggcctaattattattattacctacataattaaatccctcagtatttagtgatgtgagactaatttggcttttaccatgttcttgaaacagattgttgaagtaatattaataacaaacatttaaattactgttatttcttttttatttaaaagtggataccaatgcttcagaatggacgattgaagactgggcagttttgcctaccagtctcactggaaaaaccaccacaggcttattctgtactgtctcctgaggtcagtatctctcacgttgaaattctccagattcagtgaaatgagtttttcattacaaaggtagttttctcaaacttctaagtatatatatagtgaagtactgttattttctcctataattaaaattactctatagaatactctgaagcatttatatgctgttgatttttttccctaatctcgtacacctttgaaaggcagtgtagtatggtttccaagacttcaccgctcagttatgtgacctcaggtaagtttcttactctgctaaattgttgaagtcctagaccccagtgtgatagcttttggagatgggggcctttgggaggtaattaggttagatgaggtcatgagggtggggcctcatgcttggttagtactctgtaagaagagacactagagagctttctctctctcagctgtgtgaggagacagtgagaggtggtcatctgcaagctaggaaggcattctcaccagaaactgactatggtagcaccttgatcttggacttctattcaggctgtgaggaaataaatttctgttacttaagtcaaccagtacatggtattttgttatggcaacctgacttaaggcgctctctctctgcctgaattctcttcatctgtaaattgaggaaaataagtaatgcctacagaaaggattgtgttgataactgaatgattagtagcacttagaccttgggataatgccaggcacgtgaagcgtactaaagaagtgtctgctgctaagtcacgtcagtcgtgtccgactctgtgcgaccccatagacggcagcccaccaggctcccccgtccctgggatacttcaggcaagagtattggagtggggtgccattgccttctctgagctcttactttagcatgcatcaaaatcacctggagtatttgtagtattaccagttgtttaaacttagccctagagtttcttattcgtaaggtctgggctggggtttgattattttcatttcttacaagtgcccaaatgatatttatgctacagactgtttttaacgaagtatgtgttcacgggttacttgggggtcctattttttaaagctgaaaatgagtattttgcattgtaagagctagtgctgtttcttgcattgagtagttacaatatactccaccagcttttttttaaaaaaaagtttcaaagcctgtattatttacctcagtaaagataccacatttcttacctacattaattaccaacactaattcaattagtgttgaattgtaatagaaaactgactatatttggttttattttcttcatataataaaaataagaaaccatgggaaagaaagcctatctgcctattttgttgttgttgagacattctgtttttttcatttgtttcaaggatgtttgtaattgtttgtgtagcctttttttccctgatggctgctttaaactcctgtcagatctgtccagtatctgtgtcatctaactattgatgtctgttgattgtcttttctcatttaagtagaaattgttctggttcttgatatgatgtgtgatttttttgttctgtgttttagcagtactgagaagtcctattgccaggtggagagaaaggttcacactccccactctgcatggggcttcccaggtggtgctagtggtaaagaacccacttgccaatacaggagacataagagatgtgggttcgatccttgggccaggaagatcccctggaagcgggcatggcaacccgctctagtattctttcctggagaatcccatggatgaaggagactgttggactgtagtccatagcgttgcaaagagtcagacatggaggtggaatggggctgcggtttgttttcttggcttttgccacattagggcaattgttgggtttggctagagggagcagactttttctctttcccttttagaatttctgggttaccagcttctctagcaaactagtccaggatacattggagaaaaataaaactcaggaaacactgccttgtagttcctttgatcttgaggtccctagcgcatctgctgcgtcctttcccctttcagtctctgtttcttttttcaagtatcatgttcagggtttttagctgtacttaccaggaagaatagagagaactgatgtattgtcttttaaaaataatgttttgtgatatgattttaattaacatcccaagcaatttatgtcagaaaaaaatgtttcctaatccttaaaacaacagacttcctttgcttatgaatattttaaagccaaattaaaatatgagtttttaatataaagaaaataggatattataaaccaataagatattatagttgtgaatttattggcattaaaagagattcacaatgggataggtgaaaagcaggtttcaaaatatgtttgatatcacctatgtgaaggtgtatataaaaatatatatgtgtagagaagatttggaatgatataaagggatatgtttctaggaagctagaattttgaaggcatattttctgctttttgctccttgagccttttgcttctcttgtaggaaacattgattttgtaataagaacaaaatataatttttacatttgtttgtagtgcataaaatatatttccatagtattttttcttattgagatattataatttttgtttcataattcgtagttgtttcagcattcataatcaacttaagcatctgtgatcattgtattcaatgtcttataggttcccctacctggcatgaaatgggtagataatcacaaaggtgtttttaatgttgaagttgttgctgtttcatctatccatactcaagtaagtggttttttaataatttttacgatcacatttcacttaaatgaattgaacttaaatcagttttttctgttatgacatttgaaactatatatcagtttaaaatgtataggtttagaagtaactttttaaaggaatcaacaaaatatcatttaatgtcaacaaaagcaaatattttccttttcagaatgttattgacttcattttgagcaattaagtgatttttttccccctaagtttctagaacatagcaggataattagagttgaaaaatgattttccagttcattttatttctcatagacttagatacttcaaatggaaaaggtccttggggatctccatatttttctcaatatctctggaatgtgcaaaggtcttctgaaagactttgtatttactcattctgtaactggaacgcttttcctctgacattcatttgacttctctttataaagagaagcctttgcatgtgactcttaaacatagcagctccatcactctggatcgtcttacactgcactctttactgcttgttattttcacttgcatgctcttgtacttttgctttgtctcactctttctctctctccatgtgcatatatattcattcatatcctttgtttatgttctttctcccattatattgtaagctccttgtggtcagggatgttgtcacctgtgagagagtgagccttcctttcaaggactttacagtgaaatagaaggaaatgtgaaaataatcataatacaataaagctagtattatgttagatatatgaactaaattttttcaagtagagagagttgtcagttttactgggaactgagttactgcactggtgagtagatatttatcatatatagaagagaaggtagacagtgcagttgatgtaaagcaagtgcaggacttccctggtggcacagtggataagaatcttcctgccagtgcaggggacacagtcttccctggcaggaagagtccacatgccagctaagctggtgtgccacaactactgaagcttgtgcacctagagcctggctgtgcagcaagagaggccactgcaacgagaagcccgtgcacccgaacaaagagcagccccctctcgccaaaactagcaaaggtgtgtacacagcaatgaagacccagtgcagccaaaaataaacagataaagcaagggcaggtaatctgttgtgaatgcaatttaaagtgcatggaaagtcaagatacatgaacatagaagaccaggctgataaaagattatgaacaaccttaaatgccacagaatttagggtggatggtgatttctaacttaaaagcaaacatgagagaagtaaatttaggagcataccaagggagtgaaattatgggaccataaggagtttaattttgagtttgaagtgcctgtgcactttagatgaagatgtcccgtaggcacttgtgatgaatgagtttaggattgggaggtaacaaaataaatgtgatagctgagactgtgctagtgaatgtgattttccagggagaaagtgtagcttgagaagaggtggatgtttaaaatagaatacgtgggttctccaacttgaaagggtatgcagaggtttccaaggctaccttcaacttctgtgattttctcgcagaactcacaggattcagtggagagtatattcacagctatgatttattttagtgaaagacataaagcaaaatcagataaggggaaagaggttcagtctggaggaaataggacataggcttttgagagttttctcctagtggagtcacgcagggcaagttgaaacagcatatgtgaaatatctcccagggaagctcagttcccagagtttttaccataggcttgtctcatagacactgcctgacacaaccaaaatgctagattcatagaatgaaagcaggtattaagcataaactctattgcttacacaaacaatttaggtgtagtgagcatttgcctatcagtgtaaaccctcctaatatccaagttcctgatgccagccaagggccaaccttgaaatcaggcctttgaaatgatagcagtcttaagcttgctatgttacctcttctctgcacagtgagatagagaaaagtaagaagacagtgtctctatatcatattttaaaacaacagcaaaaaaggtagtatatatgttttatttagctttccacaggtagatctcagtaaaataatgctccagtggagtttttacttttctgttactagatatgtcctgtgtttttgtgtttcctataggacttactcttctgataatgagaaggttggcattatagtacacgttgaaacacattccttcccttaataaaattatttttagtatcacatggtatcttcttaagtgtacaaacacatttttcatttttgctttgaatcttataatcattgttagttttctctttttttttagtgttggtaatgtatcttttacttccaactttgtttttagggaggcagatatatgtgttgtcttcaatgtaacaaggatttcgggcaaaatattttatatagatgattttgaatctatagaagtagaggaagaatagactgggagggtgtgatgtgtagcatcctgacaatctcagctatgactgaagctcaaaagtttctaaattttacagctatgtaatataattgcatcatgtcctataatcttttttaaaaggctcaattgaagacagtaagtgttttttatgatgtttcataacttcatttgtatctctttgaaattgaccaaaatttatatacagagttcaatataattatttttattcatttaaaacatatcaaattaaaacaatattaagattttaaatataaagctgcttagcattactgccttttcttaaagtctgttttcactgttaactaagtaaaagtctccctggagttttagtagactttttctcacatctcgttggttataatgatagcatgtggtcgtctaatagatatgaagaaagctcgaagagcaggcacattcctgctttaaataaagactgtggttctgtcagtgcagaaggttagaaaatagcagctaggatttagtcaggagatggaaactgcctataatggaatggagaaaatctgtaaataaataattgttaactaggttaaaggtgactcactctgtaaatgggttaaaagagaatctgtaacagagagcagttacagagtgataagggaggaaggaacttggaagcctagaggaagatttgaagggtgagagtcagagccctggagagggacactgctgccacagtcacattgcgcctgctgtgctgtggttggaggatactggatagagggacccactgtggaaccggagagccacgctgctgcctacgaccctcgcctctgagccatagcttgcgcatccactcaccgccaccaggaaagcaaacagggagaagactcccttccaactcctcaagcctggcaagacggttttccataccctttgttgtcagagcctaacacaagccatctgacaaaggacaaatgtggtttgaagagtctaggtccaggattgcaaaatgtggaaaaggtgggctgaggggttggatggagctaagaggtaataaattaataatgggcacaggtaggttactaacacacccgtcataataattgagcttgataacaataaggcagactcacaactggaaaaaatgctgatatcagtagattttttttttttgagtaatcaatagtatttgaaatagctacattataataacagataagaatagaatactgtgtaattggaaacaatgtatatactaatgtgtactcttttgtgttatcaattaatctgagatacccgaggtccatagttaggagtatttacaaagctaagattgcttagtgcctctgttccttctttgttttaggatccttatcttgataagttctttgctctggtaaatgctctggatgaacacatgttcccagtccgaattggagacatgcgaatcatggaaaataatttagaaaatgaattgaagagcagtatttcagcattgaattcatctcagttggaaccagtggtccgatttcttcatctcctgcttgataaactgatacttttagttgttagacctcctgtcattgctggccaaataggtaatttacctatgtttagggaatcatgaaatctatcatttgacatttctaacttttacagacatagaaccatgattcctatttgctgtctctgtaaggactgtgtttgatttgggcgggggctgaggggacattgttacttacttgtttctaatgctggaaaataattactttctttgtttctttaaagtgtggcatatagacctctattcaaattatgaaaacaaatattcactcaccaaatctttattaggcacttaatatgtactgtacactcatgggcactgaccaaggcatggttcttgattttatggatctcatagactagttaagaaaacatgcaacagataaatcatttgtgtttgtgtacaggacttatctatgttttcactcatttgcaatcctctatgtactatagctgatattttcttcaggaactcaaaatctctatcttctttttcttgtgacttgttctggaaggaaaaatattcttgtttcctgccttttccccacaattccttcctttacttttgcttactgtgtccacccaaatcctgcaaagtagttgagctagtaagaaatttcaggtaacttgttatagaaattttgaattaaggggtggcacaaaggagaggagtattcaactccttgagatgtttttatgatgacttgtaagtagaggtaaattttagattgagcatttaaaggtgagtaagagtctgacaggtaaataattagccttgagagataaaacagtatgtgtatagtgtacaagggcttccctgatagctcagctggtaaagaatccgcctgcaatgcgggagacctggcttcgatccctgggttgggaagatcccctggagaagggaaaggctacccactccagtattctggcctggagaattccatggactttgtacaagggcttcccttgtggctcagctggtaaaagaactgcctgcaatgtgggagacctgggttcgatccctaggttgggaaaattcccctggagaagggaaaggctacccactccagtatttggacctggagaatccccatggacagaggtgcctggcaggctacagtccatggggtcacaaagagtcggacatgactgagtgactaagcacagcaactttatttatattagtgtataaaatctttacaactctagatataggtataaatttcatgatttcatgaataaaatggtgagcatatgcttaaaaatttgcctgaggattcacacccaagcaactgactccaagtcccactctttcttcctattctgaagaaatgttcactggtgaaattagcaagaataactttggtcaaagagtcatatgctttgagaatctgtatagaggtgcagaagggttcaattagtgaagcatgcttgtaagtaaaaaatgaaggtgaatagatcattcttacttagacaatcactgcttcctttggaaaggaactaaaaattgtttcagattctaatacatttatagtaaaaagttcaggactttcatgctttataaatttctagtatgacataaaaacaaggtttgctgagaagggagtaaagtggacctagttttgagaaggatggtttgtagcagctatggtatgctgtgcttagttgcttagtcgtgtctgactcttgtgaccccatggactgtagcccgccaggctcctctgtccatgaggattctccaggcaagaatactggaatgggttgccatccccgcctccaaaatagctacgataaggaaaaggaaaatgagtcatccggtaacacaggtgggatttctaaagcctgctaggtttccctgtctctctagtctctgttcctctagtctctcgtctggtacagtatgtatagattaatcttcccaatgaccactccgtctcagtattccacttttaggaaaacttgattggcctcgttatctgttcataaattcctgtcttgatgaaataaatcataaaatgtgacgctttcagaatagctgttcaggttatccatttattcactgtgctatcagaattttccagcttttgcaaatttcttgttatatactgacttgcatggctgagtaggtattacttaggttggcatttaatgtgcagtgatcttacctcatcctggttttctacccttttgtccttctaatccttttacagattctgttttcagttaagcagcttatcagctgtattcatgttaatattttcataatctacttttattgttaatttttattttttaaacaaaagtaatgtgcttaatgtatgatatttagtttctcagcgtcatctttaaaatgagaagttacttctcaaaggttctaacaagatagatttttttcttatcatatactttgtattattttacaaaatggtgggtacctgttcgatgatttttttattttttggagtaagcaaaaccaggtaattttcctgtaaaattagtaaaattagattttttcttattttgttgagataaatatttttgacccagttaatatcataaatagataccataatattaatgtcaaatatcatcttaaatatttactgtgtgtagtcatacttaatgtatacagtggaggtaaaactttgatgtttttataacttacagtctaaaaatgttatagttagtgcaaaaaatattttcttccttcctaaaagttaatctaggtcaagcatcatttgaagctatggcatcaattataaatcggcttcacaaaaacttggaaggaaaccatgaccagcatggcagaaacagccttcttgcatcatatatctattatgtttttcggttgccaaatacttaccctaattcaccatcaccaggtattttattcttttttactatgaaactatcttgaatagattatatgtttattgtttataagcaggattgaaataatcttgaagtgcataatgtgatgtgtttattcaacaacagacatttgctgaatgcctgctgagtgccatggactaatttagctactggagttaaagggataaataggttacattttaaagcatcattatttgtacagcttcctttaatttgaattagagagatcttagttgaattaatttttggaaatgaaccttgaaaataacttctgtttctggaagcatttctcatttcctgttaagataaatagaatgttatattggttatatagagtgttattggacattaaagaagaaatatgatggctcagcagtttcctgataaccttgtgaaacctgcagtgatataaaggatgatcttctagaaaagttctgatctcttcatggtcaataaaataatatagcctttctggatactagagcccaaagtagtcacttacttgtgtcttatatgacattggtggtagtggtggtagggggcatatctgagtgtttgagttaccctttagtcgtttagttagttggttaatgattatgttgtgcatacttttcaacctgtttacatatttgtctgtaagagtcatcattcatcactagtgaaaatggtaagtgccctttttcagctattgtcagtgttaacataaataatgatgacaagaaattctgatattcacttggaaaactaggtataataataatctaagttatagtgcattttattaattgcaaaaagagaactgattgactcttgtatcttgttcattgtttcctatcctaatttctaagtttgtctctgagtataagtgattatggactatatgtaatgttgctccatttactgtttcaattagtacactatgagaatttcacagattttacaaaatgtctttttcacatgctgacctgaagactataaattacttagttgacaagtgtatgtcatttgcaaatatgacacttagaaagatttcattaaataagaaagggagttacagttgttgggtactttatatttatagatcctggttgaatgatggtatcaggcttgatttcagatagaaaagggattctttgctttcttcatataacctgggctcttaggagaattatctttatttatgtatgtatgttacaaagatgctattttgttacagttaaaaattatcactgatgaagatagagatatagccatagcttcatttacgagatactgatggtaaattcggagaaggcaatggcaccccactccaatactcttgcctagaaaatcccatggacagaggagccttgtaggctgcagtccatggggttgctaagagtcggacacgactgagtgacttcactttgacttttcactttgatgcattggagaaggaaatggcaacccactccagtgttcttgcctggagcctggtgggctgccgactatggggtcgcacagagtcggacacgaatgaagtgacttagcagtagcagacggtaaattgggtctccctcttagtgactgtgtgtcaaggggcagagcaggagtgggtgggaaaaaaggaaaagatgttagctggagcactttgggtcctagataccctcatatataagtgaaatgacgtttgtatatgtttcttattactctttttattctatgtgtaatacagaatgtagaaacattgaagagataatggttgtatttataattcacagggttttgtcagctgctgtaaaaaattatctttgtatagctctcatgaggtctggagaggttttcttgattctattattttcatttagaaataaaagcaatttatgatctttatggaattttgtaaagtggaagagactttttcaggtcctttcccgattaactgtttaattatgtgctattttatatacaactctaggtcctgggggtttgggaggatcagtgcattatgccacaatggctagatctgctgtgagacctgcaagccttaatttaaatcgttctcggagccttagtaatagtaatccagatatatctggaactcccacgtccccagatgatgaagtacggtcaatcatcagcagtaaggtaaactgaagatatacatctataaatttggtttccagttcatgaacaaatgagaaatatccagttgttctactttattcttaaaatgtatctgagttagtaataagaattttaaaatatatttgaattagtaataaattttatgtttctcttctatcggtgaacacataagtggtgtttctattaatgtgcttgctattacaaactcgtttgtgcactatgcttaagaaaatctgccaaattcaaaatttgtccagaacgactagtcacatacaactcactgtctgtctgatcatcatgtgaaaaatggtcatattggtgttctacagggttaagagacctgtgactgctgtccagtgggaccatattattgacttgaaatatgtctcacttctctaaaaatataaataataatgattaacaattaattggtaatagagctatatttcacatggaaaactctatgtaaggtgctccaggattagaaaaatgtgatttagttaatcatggttaatgattattccagacaacaagggagaggtcggctagtataagatccagccatattttatttaagcatccatccttattacctccccatcacatatacttaaggaacaagtagtcattgccgtactataattaaagtacaaaaataactcggtttgaaaattaaagtggaaaaaaagagcagtaaggtggaggccaagtaatcatattatgtgtgttttgaccaaaccatcctaagtagatttttcgccattggaaaggaggaagacaccattgttaatagaatcatagccaacttttctttggcatttagtctcttgattagggtatgagaaagaattagtaaacgttctgcagtctgtgtttaactcttagtctgagctataatagactttttgaaaaaaatgatctgagtttgtttgttatgtgaaatacttggatattgaccaaacacatcagaattactaaaatctattcatacagttatagaaatttgcattcagaaatttctaataaactttattactgctcattttaaaatgccttttaagtaactttaaagtactttctcacagaccaaaaatatatttttaaagtaatttctggtctgtgagaaagtgaaaagaatattttgtcgctttttaatttaaaaaataaatgtgaatttcagtatttaaagatccaaatagatgttactctaattaaagaaacttcactttttgtgttgtacagatgtatttacgtgaatcctgcagagtaacagttctacttactaatgagaaagcttttctccccccacatatctttccatgtctaggaaaaggttttttatctttgtcttcattcttgatcttttctcactgtaatagaagtaacacttagcataatttactgtaagggcagttcttcagtagaatgaatttcttttgtgaattataagaggttttcctgttaaagcgctatagacgccattttcctcaaggttctacttttgaaacaccttttaatttctataagatttagcatagttctagtgttttcctttaatatgatgtgtttgatagattataacatcatgatttagaacaaagatgtacatatattggaatgattatttgccttttttcaagtggttcataaaatggggcataataatgatataaacttgcttctggtattatgatatatggaaacgtctgagaaagccactataagatgagactttgtcttatgacagtatagtgttgtcctaatcaaattttatttaaatgttttttatgtattcttttttttagtgcaaaatttttgatcgctaccttcattttggcctaccctttagtcataatccctaataataatggtgtataacttttatcacattggaaaattataaggaatctgaagtttatttatacctactcttcatttattctgattctgttgacttggaaattcaagaaattctttaatgacttttgtctttcatgctgccttagccatggtcgtacccttggtcttgtcatgacggataactttaatcctcataatctcaatttcatgcatcttgttctctaatcattagctcatatttttctgtctaataccccaactccaacaattactctgcaacctccagtcacttgatggtaagatatttttactatacctcaccctgttaatattctttcatccagtttagccagcttaaattccatgagcagtcattataattattacctttataaacagacctcagttcccttctcttcctttcacttcattttacttgcttaatccaaacctcaaactgtagttgaatttcgttgactgcctgtactgctaaacatgatttgagaaatgccatgactggtctcatttgaaattaaaggctctcttgaggttaagagaacccttaatgctgtcaaacaattgtagtatatttctttattccatttactttcccattgtcccagaaaaaggttacatgctttcttttgtacctcagatcctctaacagctccccaccagtccttctcactttatctcctacttcattaacaaattgaggtcattagaggaaaacttttttaacctttgaccatcacatctccttaaccactaccgtctactactacctactactaatatgtctgtcatagatgacctgcccatttctttaagtccattccctctgtttgtatacaaccttccatcccttcacctactcaggatccccactccaacagtgtttatctctctcctacatcttcagtttctccccgtctactaaatcatcccatccacgtacaggcatgctattatttctccaattaaaatgtttttttcctttagtatttcttctagtagcttctttaccatttctcttctaccttttatggtagaattccttaaaagcattttctatacttgctgtcttcaatccttttactcttgttctttaactcccatttgtttgttgttgtttagttgttgagtcatatccaactcttctgtgaccccatgtacagcagcccaccaggttcctctctccatgagacttccccggcaagaatcctggagtgggttgccatttccttccctcaggggatcttccccacccagagatagaacccgtgtcaagggcattggcaggtgggttccttactactgagtctccaaggaagccctaaacagtcgttatcctacttcaaacatatttctttgatcttccacgcatcagttcagttcagttcagtcgctcagtcatgtccgactctgcgaccctctgaatcgcagcacaccaggcctccctgtccatcaccaactcctggagttcactcaaactcatgtccatcaagtcagtgatgccatccagccatctcatcctctgtcgtccccttctccttctgcccccaatccctcccagcatcagggtcttttccagtgagtcaactctttgcatgaggtggccaaagtacaggagtttcagcttcagcatcagtccttccagtgaacacccaggactgatttcctttagaatggactggttggatctccttgcagtccaagggactctcaagagtcttctccaataccacagttcaaaagcaccaattcttcggcgctcagcctcttcacagtccagctctcacatccatacatggccactggaaaagccctttgaatgctgacagggctctccaggcactccatattcttaaacctgatggttgagcctcaacacttgacttactttaccttatgtgtatgtgtgctcagttgctcacgtgtgtctgactctgtgatcccatggttgtagccttctaggctcttctgtccatgggattttccaggcaagaatactggagtggattgccattttctcctgcaggggatcgaacccacatctcctgcgttggctgtgctgtgtgctgagtccctcagttgtgtccgactctttgtgaccccatggaccgtagcccatcaggctgttctgtccatggggattcttcaggcaagaatactggagtgggttgctatgcccccctccaggggatcttcccaacccaggtcttctgcattgcaggtaaacccatgagtactggaatggtagtgtatcctttctccggggaatctccccagcccaggaatcgaattggggtctcctgcattgcaggcagattctttaccagctgagctactagggaagccactgagccactgtcttacgacagctttgacacagtaattctccttccttgttgatttattctatttaattggtttgtagggcactacactctcttgattttaagagcttattacacctgcctaatctcctttatagatttttttttctgatctcttaatttggaagtgccccaggtttctgtccttatttctagtcctcttgtcttgttttcctttctctcttcactccccgacttggtgttcttatgaagtccagttgttttaagtatcattatattgtgatagttaacaaaaattacatttcaaatctctctctggaattctaaatctctgtctggaattctaaactcagctgcatttttaaaacccttttgttcagatttgcatatgttaaaagtagagccacttcctaccacctctaatactaccatttggtctgaattaccatcatcccttcctgaatgaatgtaatagccttaaagatggtttctgtgctttcagcctatactcacttcacacagtagcaaccagaatgctgctttaaaagcttaaatcacaaacaaacaaaacttaagttggattaatgtcatttctctgagcgagatcctttgactaactcctctgcttctctaagtctttacacaaaggactgccttccccatggggtcttctctgaccagcttattttagtgtctaaatgtgcctttctcctcagccttgtgccagggatttctcaccccttactctgtttctttgattgataacattgactacctttaatatagcaaatatacattagttacctgttatgtttattttcagtgtttgtctcctttgattagaatataagctccatgaaggcagaggtatttcttcactgatgtatctaaagtagctataatgtccagcatatggaaggtgctcaaaagatctctatccaatgaaagaatgttaagtaagcactgagtatctctaccaagagtaaacaatttaaaaaaaatgaattatgctgttgtttgcctccttgctagcaggattaattaaatacttaaagattttaagaaatttagttttatgaacatttcagttagacttcatttcctaatacaaaatgtgaaactactaaaattaaaaaatactataaacaggcgtttgttactctagtgtctataaaaccatacttgtgagacttttcataattattttgccacaactgatctttctttatcctagcaatgttaacaatctgttatgtaaatactaatatatggttacatcaggtttgaacttcattgcttttagtcagtcaaattccagagcaattttacgttgataattagtatttctaatgtattgtctcctttttcatttatttttcaaacattgaaagcttactgtgtgcatagctcactaaacccactatgctgagggtttgtgggtataaagccaaatctttgtattaaaacatgagtattgatggcaagtgaaattgacttgttcaaggaaggagcctgtttgcatctaagggacaaaacaataagattacagagatttggcaaaaacagagcaaaaacactttcatgcacacacatttggttaatctcttctgctactggagatccataaatatagttgctatatttgtaaatatcagtgatgaatttgcttaactgagggctgtttgatataattcttaacgttatgacatttaaattatggaaataatttgctttacaaataaattggctaccagttttctttaaatagtcagctttgactggatgtaattataactcttcagagtctcaatattgtgaatataatatataattaatggtacaaacagggttattgtttattctcacatgacttattagcacatgtcttaaaggaaattgttaagcaagaggttaaaaagtaaacttgtgttacaccaaagttactgtttttctttttgtagaatttgtggtagggagagcacaattgtttttctgttattaaaataatattaaaaactttttgttattaaatactattaaaaataatatttgttatttttgtagcataggtagtgacataatttgaaagactgaaagtttctgttttaatttatctgaaaagcatactgtgtgctgatttgcttttatttgaaataatataatgaggttttgagaagtctgtataggggtattttattttaaacaaacttactgattaaataattctatagtatttgaatattgcccaatttactttgctaggaagcattaaaaacattagggcaagtttttattaaaactttttaaagaagtttgtatatttgaggcattacattcagtgatttacttccattatttaatttgatctttacaatatgaaggagacacctcattattcccattttgtagctaagaaactgaaaaagagattaggtaatttaccttagattttgcaattagtaagcagtagaacctgcatttcaactttaactctcatcttacacattcagtgtcaaaaatgaggggaaataggtagttaccgtatcatcatgtcaacttctctgtatttttggaaaaagagtacaggaaaaaggatgggaagtattctccctataaacataagcctttgagagctagtagtttgtcttccttcctcccccctccccttccttcgtcaccccccccctttccctccctctccttcactctcctccttcctgcaatatcatgcgtaggcctcactttcagagattctgcttggaggtagggccctgcacatgtgttgtggtggttgtccttaaccttcccaagtgatactaatgtctacatagacttgattaccattgtttactatttgttttcttttacctgtcctctttggtgctttctgtctgggctcatactcagccctgatatttctacttggcttgtcttgtgttatcttcagcagtcctctaaaaatctcttataacttgttcagttctattagcggatttccagggcccagcccagattactgaatcaggaattctgtggggtagggcctggaatctgaattttataattcaaatggatcgatcaggtttaagaagctgaattaaagccccagttccctttttgttgttcagtctcttagtcatgtccaactctttgcgaccccatggactgcagcaatccaggcttccctgtccttcaccattttccagagtttgctcaaactcatgtccattgaattgatcagttccctttacctaaagtcataataatctctttcagagaagatagacataattcacttgtgaaagtgaaagtgaagtctcagtcatatccgactctttgcgaccccacggactgagtgtagcctaccaggcttctctgtccatgggatttcccaggcaagaatactggagtgggttgccatttcctactccaggggatcttcccgacccagggattgaacccaggtctcccgcattgtaggcagacgctttactgtctgagccaccggggaagtcacttaaattaacttcaaattgatgatagtgatgatgaagataacaaatcttatggacagccccagcataaggttttttcttacagtttttgtacaaaatactaactgattatgtttactttcaacaagcacagtaagactgaagacaactccaaatctactatcatttttaggaaggagcatatattgggcatctttttttctttcttaatttttgcctaatttttcttattggtccctaaaagagagggaaagaggaggcaagttcaaatacaattacggagtattgctgcacagacgttttcagttgatgacagatggagtaaaatttaaagtcttttagacgagaatggaatgtttttcttctttcatttcttttttcttttaaacctcagttagattcagaggaaattgttactagcttgtaccatctttaaagagagtttggggggatggttgctgtgggaactttgttgatagttgaaattgatccttttatataaagataaattaccattaaatactatgcttaattttctttgtgattttaaaaaagttactatgtaataagatgattttgatgaactaatattctatagatgcctaaaaattttgggtgctttaacagtactaattaaaaacatgtttgcattggaaagtctggatttctttaagaatatagcatgccacattaatatttctttcctttccaactgctttctattatatgcttagggtttagatcgctccaattcctgggttaacactggtggtccaaaagctgcctcatggggatccaaccccagtccaagtgcagaatcaacacaggtggtgtttatgttagaggtttcttttttggctgctgatgtttccctttagaacgttacttcttagcatatactgtgatttcagtggcttgctttcttaatcattaaaaagcgtgttttttgtttacttagcacattttccaactgctatgcatgaataccaccagttgcaccagtaatactttcctttcctatttcctgtctcctgcttcgttcgttgtacaccccattgatgtttcagtgcctgctgcttatgtaattgatggctttgataacagtttctaccctcggggtaccacatcttcaggaagaattttttaaacaaaaaattttgtgtggaaaaaacctgacagtttttcatttgcttttggtttaaagtgtagctattgtgtcattctccttcagcatttattatcttgtcattttcttcataatcactgactagaaatgttgtgaataagctgaaagtaaatatgaatagtatatgatccccctgctgtaagattaagtaccagaaacaaaaatctgttttaatttgtactgtgttgcaaagtatgaaatttgttgtaacctctttgtactaggttttgcttactttagtctagttgcttgatagctaatactgcatgattcctcaaaatatacttctcacctgtgtgctgggtttagaggaagatgctctctctcattcttgagggaaaaatttaattgcaaatttagtattataaatgatttatatttaatatagtatatggcagatctgaatcataatttttgatgatagtgaaacataaaagaaaccattctgaacttttaatttttttaattaaatataaaattcttgatttctctttttggtctgagaccagtgagaagtatgtttttactttttgcattttcttactagatatatgcatgtgtatatatcacagagataaaagtttcattctttgcagcactctcaatttatataatcattaaaatatttaccttttaaggataaaatatatagaagccattttgatacttctaatacattgtcattaaagcaacttaaatggtgaaaatgggatgagcaataaaatagatggttgttgaaaccacagtaaagctctatttaaaaaattgtatgtaatccttgaggtgcaaagtcattcacagcagactttaatgttatttcatcattcattcatcttcactccataggctatggatcgaagttgtaatcgtatgtcttcgcacacagagacgtcaagtttcttacaaacattaacgggacgcttaccaactaaaaaggtagattcatatgaagacaattcatatagggggaaaataattccaacaattaagtagatgaaaggtttctttacataaccagaacaagatgttaaaataattggattgtttttaaagatacatttgagcaagcattgcttgtctgatgcctttttgggcaggcctctccattgcaggcccttttacattattataatgcttatatctttgtggatgaatatttttagtttagtgacttaaatttgatcatcaaattttagtaccaaaaaattgtatcaactcttaattctgtttctgtaacttgcttctgttttgtgttttaaatctccagggaaaggaagatgagttagaaaaattatcactattagtaagatatgttgatttgcttcccttatgcacagttgtgttagtcctttttcataatatacactcttttgcaaatgctttgtatgcatatccattataaggcaggaaatttctgctgttttaataaaatgactttaaatacctgagaccttgaaaattgatggctgatatcaaagtttaaatttttaaaggtatttcctgaattgtaccagcaaagttcgtgaatgtatttgcatttgttgaaatatatatgtgagacaaaagccagattttattgtagctgtgagcttttggtctagtttctgtttgcaggtacaatttaggaggctctttcccacctgtccttttaaaattacattttactgcaagataacatgtaattttttcagctgttcaacatgccactgtcttacatgtataaatagccgtttcgttaatgggtgtcctcactgcatcgttgaatggttcacatgccttatttgcttatcctcattatatcttcatttgtatttgcattattatttgatttgtgttatcagcagacctggcattgataataactttggatttacttctggatagctttttcatgaggagctggctttgcagtgggttgtttgcagtggcagcgttcgggaatcagctttgcaacaagcctggttcttttttgagttaatggtgagcaaactaaacacattttgtaatactgttttccttattgaataattttctgttggctcattattattgtcctagaaatctttctctgttgtccatgttatggttttacatgtgcctccaaagaaaaattctgtttgctatatctctaaataacactgtggataatcagcactatttagatggcattataaagctaattttaggtttgtttttaggaacagttggagaagctagctatctttttaacctgtgatatgttctctcttagtccaaacatgaagtgaagtcgctcagtcctgtccgactcttagtgatcccatggactgcagcctaccaggctcctcagtccatgggattttccaggcaagagtcctggagtgggttgccattttgttctccagggggtcttcccgacccagggatcgaacccaggcatactagtgtataatggtaataccagataaaaagagctttatagatacctactgcttttatggctaggaagctcttaaaatggtgaaagttcttaaaagggaaatggtggttacagccaataaaaaacaacaataattttttcttaattcagtaaatgatattaaaaacaagtaaatgaattaatatttttgtaaatatacacacaacataaacacatatatacatagaagcaatgtacatacacacaccgtgtggtcagacctatggccttcggattatcaaggcacagagagattaagatcttgtttaaatgcacatagcttgtggacagcagacctctaattcagactcaggtactctggcactcgggcccttcctctctatctatagaaagctgaaagcaaaactgaaaatttttcttctcaaaaattatgtaaaataataagaacaagagcaaaacaacaacaaaagatagagagaaaagaaacaatggaggttctagagtatgccacccacagtcattctcattattgaacgttacttatattgaggataagaagacatttcttctgcagattaaaactaaatgaggtattatctcacacctgtcagaatggccatcattaaaaagtttacaaatgataaatgctggagagagtgtggagaaaaggaaaccctcctacactgttggtgggaatgtaatttggtgtagccactatgaaaaacagtatgactgctaagtcacttcagtcgtgtccgactctgtgcgaccccatagatggcagcccacctggctcccctgtgcctgggattctccaggcaagaacactggagtaggttgccatttccttctccaatgcatcaaagtgaaaagtgaaagtgaagttgctcagtagtgtccaactcctatcaaccccatggactgcagcctaccaggctcctccgtccatggggtttgccaggcaagagtactggagtgggttgccattgccttctccaaaacagtatgaagtttccttaaaaaactgaaactagagttgccctgtgatctagcagtctcactctggatatgttatctggagaaaactcttatttgaaaagatacatgcgcccaaatgttcatagcagcactatttacaatagccaaaacatggaagcaacttaagtgtccatcaacagatgaatggataagaaagatgtggtatagatacacaatagaatactattcagccataaaaaggatttaagtaatgccatttgcagcagtatggatgcacctagagattaccatactaaataaagtcagaaagttaaatatcatatgatgtcacttatttgtggaatctaaaatatgctacaaatcaacttatttacaaaaccaaaatagactcagaggtagaaaacaaacttacagttaccaaaaaggaaaagggatgggagagggataaattaggagtttctgattagcagatacaaactactatatataaagtagatgaataacacagtccaactgtatggcacagggaactatattcagtatcctgaagtaaagcataatggagaaaaatatgaaaaagaatgtacacaagatgaaatcatttggctgtaaccagaaactaacccaacattgtaaatcaactatacttcagtaaaagttttttttttttttttcttaaaaagaaatttcttcttgagattttctaatcagcaaaaaaataagtcagggatcatatgtaagtgataggcaacacatttttccccccggagactaaacatcagattataattcatgtgcttttaatataagatcaaaatagtaatttgcctttttttttaatagccttagatatatgttcagatttcttaaaacacaaaatagtcaaaatggtacagtttaacttgtttctaccatttaccaactgtaaaatcttgtcattaatttccctgaatttaaaattctttattgtacacactgtgataagaatttatatctaaaagtattttataaattgaaattattttgatttttatctaacattttattcttaatatgtattcatcaatatttaatgtatacccaccatatgccatgggatgctaagtgctaaagatactacatgctgtcaagatttctgatccctcaaagctaccagttgcaggggacatggaatggcacagtcgctgagtcttagaaagatttaacttaaagtaattttaaaggatgaaaatttttttctgttgacatacccagatttttttccctattgatagccagaatagttttatgaagatgttacagagattgagttgtatgttgtttgatatttctttagagcatacaaaatattgtagggaactttttcataatatttgaggagttaagagtattttagccttctattaaatcatgtggtatattgacagaaatgaccctaaagtttagagttctgtaactgctagttaaaccgataagaactgctctatggcgcagggagctcagcttggtgctctgtgatgacctagatgggtgggatggagtgaggtgaggggaggtccaagacaggggatatatgtatacatatagctgattcacttccttgtacagcagaaactaatgcaacattgtaaaacaattatatttcaatttttaaaaaaagaaattgaactaatggcttatttctttttttaggtaaagagcatggtgcatcacttatactttaatgataaacttgatgcaccgaggaagactcgttttccagaacgtttcatggacgacattgctgctcttgtcagcacaattgctagtgatatagtttcacgatttcagaaggtaatgataacttatttttaaaaactaagtcaatctttcaggcacacattaaactatcatacttttgtttttctttttaaattttgtttcccaggacacagaaatggttgagagactcaacacaagccttgcattttttctcaatgatctgttgtctgttatggacagaggatttgtctttagccttataaagacctgctataaacaggtaaagtataattagtaatgaaataatttaaattctgtgtttgctctttaagggctagagctaagaaactttcatgaacacatttatataatgatgtttttaaaaagtggtattatatttattagtaaggcaaaagtaaattatatttatcagttcatagaactatggcaagctgctatcagtagagccatcttttccttgagttatcctggcccactcatgactctttaattcccattagaagtataccatcaagtcagtagtctaaatgtaaaacagccccaggttgccgtgccagagtagcatttttactgaatgaacagctaacccacccttttctagcttaagtgatttttaaagcagttggattttgctgtgtattcctcatgatgaaaccctagacattgtagagtttagaatcgtgggcagatgtttacccaagtgtcaaataccatcatctgccttttctaaactaaaagtatcctggaacttttctacaaacagctggttttgtgttaaaattttcaactgattaatgaaacctggcttttagaagacattagttatttgtcctgatagactatttgggtagtaagttatataatcatcctaaaattgccttttaaggcagcttaaaaaatatacaggtctcttgtgtcccatcccagcattattgaggagtttgaatcctggtggtggggtagggagtggggaaacagtgcttgtaaagtacttccctgctggtccacagattaatttaggggaaccactggtttaaaatgtatttggcagtctgatacttagagttttggaaatctgttcagttggatgccattattgtatgtatctttctttcttttttgtctgatccatgcatcatgtgggatcttccctgactggggattgaatctgtgccctctatattgggagctggagtcttaacctctggaccaccagggaaatccctgttttgttttttaagagagaagttgaaactatgcctgggcactgatatgttggcaagtatttgccacactatgtattattcttaccttttcccctgaaatttcatgtattattgctctcaaaacctgtcctgtctttattcttcaggcattaacctcctacatttgtcacacattaagctagactctagggatgctagaactcttaaaataagtcagtttataaatgtctcctcgagtaagtaatggtgtagttgggaaaacagatagttaaaaatatatcttagcacaaactgctgagaaaagaatggataatgtattttataaagttattttgatagcataatttttcttcagaaagaatatatccttgagaggtggaaatattaatgctgtattggaaatataagaatgtggctttaagaatgcacctcgtcagtggatttatacagtaaatcttgtagttctaagttttttattttagcagtaactctggaaaaagcggacactgttacttaaaccacaaaacccaaagctgtccattgagtactgttttctaattctttaattcatcattctggtgttggtattagagaaatgatatgttcaattggtatttttttttaatttctgcaatacttacaaggtatcttcaaagctttattcattaccaagtccaagtgtcctggtgtccttgaggcttgattttttgcgaatcatctgcagccatgagcactatgttaccttaaacttaccctgcagcctgctcactccacctgcatcaccatcaccttccgtttcttctgcaacgtctcaggtatgcaaaatgtatgaaaaaagcttttttttaaaagcctgcatttgcggaaaaagcattttaaatgctgggaaaagtaaaaagtaatactattgaataataactgtgtgataggctccatactcagggcttttgtaagtagtaaatgattaagtgctttataaatattaatcatttactactcttcattgcaaccctaagaggtacattctattattatcatttttttacaggtgaactgaaacacagaaagatcagtaacttacccagggtcacatagtaaaaactggcaaaactaggctttgatccatggcacatgttagctttattttagatctaagttctaaccacgtgttgtatccctctgactgatttgcgcacaagggagtgaattcacctacataataaaatcacttgacattttcacaggttgggttttcttgatgcagacacagactgaatttggggggcaagatgtttattagctgtcagtacctatggaaggaaagggaatgaagtgtaattagcagagaaagaagtaaaacagcaatgtagtccttgcaaagccctgcctgcctcttgtatccagagaacccaaaggaaactaggtgttgttcatgggttttcacagggtacctaataattgctctaaagacgacaaaggattatcatagcagtaattatatgtcctatcatacagattaaaatgaagggattttgtggtttagtatcagaggagcctagatgttctctcctagggaaatgttttgctatataattcctaagacaaacaagctacttccttaagctcttttgtttttttgaaaaaaattgtttatttggctgtgctgggttttagtcgaggcatatgaactctcacttgtgacatgtgagatctagttccctgaccagggattgaatccaggctccctgcattgggaacacagagtcttagccattggaccaccagggaagtcccttccttatattcttaatgtctaaagtcaaaggtgatctgaactctttttaagtttgcttttgagatttttaattcctgaaagtaatttactacactaggtcaatctcagatgtttgataaagaaaattttaaactttacttagaaagattgaaaaacacagagatcacccacaacttctcatttttcacctttgcaaaaattcttaaggatcagcctgtttctacatacctggctaagacacgtttcttctaataactaatgaggctagtcttttgttctcttcccccatcctctggcaaagatgtggctacacaatcaaggacgaattaatcataggtagagttccttaaacctttaatgaaacacaattgtttatacttgactccctgctgaacatcttatccagccaagaaattaatagaatttcttccagtgtcctgtcccctactttctcatctagctgtgtaattttcagattctaggagatgacagaggcatcactctttgggaggtagggacctgaatagttttatatacttactaagaaggtgatttctccatagagaaatctggagtctgttgtaagaaacctcgcattgttggtcttgaatatggattaaagggtgataaggttgaggacattcttgccttgaactgtatcttgggggatgctattttgcagtattagaaaacttgtaaaaactctgaatgaacgaaaaaataatagtaattttctagagatagtattttccctgaaaaaacaaaaacaaaaacccagcttcattagtatttgaaatttctctggaaaccagtagcatttgactatgaatatttctcttgtactcaacagtgagtacataatgcatcatagagattcagttcttttttccattcagaatatgatagtgaaatatttagtggctaaaagtataaaggaaaaatgagatgaaaaaaatttaatatgagaaaaaggaaattgaaaataatttaaaatgttatttcatcagagtttcctataccaaaagtaagagcaggtgctttctccagtgttaataatagtaatgtaaaaataaacttaaaatgtttgtcttgctttcagatgatgctcacatctcgtttgttgtaatgctctgtctatagaatgtttcgttgcttagctattatagttttgttctacctcactcccaaacagagttctggattttccaccaatgtccaagaccagaagatcgcaaatatgtttgaattgtctgtgcccttccgccaacagcattatttggcaggacttgtgttaacagagctggctgtcattttggaccctgacgctgaagggtgagtagaccagctttgctgtgtacagtatcagtttgattttggacagtggaacagaagtgtcccacttaactttctgggactcaaaaggatattctttaccattcttcttctacttctctgttcactaagttctatactcatgttttttctgtatttcatcagttttaagaaagatattttttgtcatctctgaatttgatatttgtcttgaagttagcatgtatcatgttgtatcatggtttagttggtatatttttttccttcttagtagtacctgaaatatttgtgcatgttagtagatggactttcagatttgttaatatgcaacaagcacaattcagttaaggaaaatagactagcctgtttggttctttgggagtaaaatttgtcatttgccatcgtattaataatatatagcatgtactttaaaatttgccctataaacaagtaaacttgttttaaaaacttccacacttttaaagaattattggaaattgatatagtaagaagagttcgttgtctgatttgaatttgcagaaacagcttttctttctttctttctttctttttttttttaagaaacagcttttctataaatgtgttgtgatctaagatccttgtagggtatttctatcttcatagctgttttcaaaaatgtttatgaccataactcatttgggtaataattgctctttttttcaactttcctcatagtaggatcattaaggagtttgtaatgcaatttaacctgaagtaagagctccagagaacaaaaggagatattttgagcaggttttataagaatcctatgatgtatttattgagcaaatgaaatgaggtttgtgaagttcttagcgataggtacatagttaatgcttaataaattgtgaaaagctaaatcttctgcaaatgaaaacatgagtttttttcataacagcagcttctcatgttagggatatattattaagaagcaggttttcacactgtgctctgcagaactgtagggttctgaaaaggttcttagtgtgtttccatgtaggatggggttgtgatgcagacatgggagtaggggagggcaggcttagtgggtgagactctgggtctcgcacccctgcttgccaccactcttttattttgccattgataaatgaatataatgtcatttggggggaaaaaggatccattgtttgaaaaaaatcactctgaaggcaacttctaaacatactacctttccttagtaacttaaatctcaatcatttgaatttatatttccagtatttttacttgatgtatcagaataattttggttaccagaaataggaaacttttcttcttgtctgttttattaaaggaaggatactatcatttcaaatttggaagaaaggtaaggttttagcacagtataaccaggagctcaagtgatgttatcagggttctgtttcttttatatctaatttctgctaagagcctaagctttatcctgaggctcgtgtgcctttcatgactgtaagatagttgctctggcaattcagattaaattcttacttgttcatatccagcagggcagagagggaaaaaacccctcttcccaagcatgcagtgcacatctttctttgaactggtctggctcacttgcctgtcctgcactattagacaccagagcagtgccaggttcttaggtgagttagatcacttttactcacatgtagtgcttagacaggttttggttcatgggtggtttattacaaagcagaagataaggagctcatgcctaaataataatcagctgtcactaaaaagtgtttagttcatgtgatattttttgttagaccttctcaattaaggaaacagttgagtaacattaatctcttctcatcttagtaatgaaacagcttgttgactggctactgtaaatggcagggctagtctgattggatcgacttcaggaactaggggaatagagtcagcttcttctgaatctcagggacatgaaggtacacctgaacatttttgcgttccattagggaggaagacaggtgaaggagatgttgtataggtgttcagtggtgtctgataaagaatagagaattctaacagtcaaccttctttaaaaattttatttattttttaattgaagggtaattgctttacagaatgttgttgttttctgtcaaacctcaacatgaatcagccataggtatacatatatgccctttgaacctccctccccatcccacccctctaggttgatacagaacccctgtttgagtttcctgagccatacagcaaattcctgttgcttatctcttttacatatggtaatataagtttccatgttactctctccatacatctcaccctctcctcccctctttctatgtccataagtctattctctatgtctgttctgagatgttgtgtaggtattcagtggtgtctgatgaatagagaattctaacagtcaaccatttttgtgatgaggtttccttctcaaagtcaagggaggatcagttctgttaaaataggtacatttctgtgggacagtgtagggctcatgaaagacttcttttttaaaaaaaaaatttgtatgctgtattcagagttctttttaaaaaaatttatttttaattggagggtaattgctttaaaacgttgtgttagtttctgccatacatcaatgtgaatgaaccgtaggtatacatatgtcccctccctcttgacctctttactgctgttcttcaaggtggctctttagatactttctgaccctgtaaagtctgaaagcaatgataactgtggtcaccactactttttctttgtttattgagttttaaaaggtaactggaatagctttaaatagtaatatacaggattataagctgttactgctgtttgttctcttgtcttctcactctttcctacacccagcccattggcaagtgctttaggaccacctctacaatataccccaagtccagctgcttcccttcctctctactgcttttcccctaagcgtgcttctgctcttccctccttaaaatcccttttctacacagcaacctaaatggtcttttagaaatgaaaattaaattgtattgcttccttagttaaaactcttcaatgtatttaaaagggtacacttcttactttaaaaatacttaaaagtgtatgcttttaaaataacatttaaaataaaatccagacttagtaatgaacctcaaaaccctgtatatgtaactcttgtctacactgtcacttcccttcttccttatatactacaatctagccatcctggacttgtttctgtttcccttatgggcctacccagccccaccttggggtctttgcacttagattttcctctgcctgaatcagtgcttatattgccctgagatttccacacagaggcatttcttccttgtgattcttcaggtctccagtcaaacagtatcttctcagtgagacgtcattgggccacccagtctgaattatggctgtgttacccttgccacaattattcttaaccatataagcctgtttacttttctacaaagcacttccctgaaatttgctcgtttgttcattatctgtctcctcccattagaatatgagctcatgagagcagcacttttctttcttgttcactgctgtattcccactgccttagaattgtgtctggtacagagtggacacttggtaagtatatgttaattcagtgaatgaatgattgactatttgagactcacacctcatctctatattttacatttttttcacatttgcatagataaaaacagcatacattatcttagatagacccttaagaggaatgtttttactctttttgcttgctaagtaatcataaataattccttgagtagcagcaatatattctaatattgaccaaagatttgctctctagaaattttcattgtagttagaaagttacaactttgaaacaatatactatggttaaatgcaaattttgtagtacagaacctagttctgaagaagattagcacctttgttacaagcatttgtaacactgaattattatttttctgtctgtgtttctctcttgctgaagcaagctctttaagaacaaggacaaggataggataagataggaagtcttgtctccaacatccagcgtaagatatggcaggtcttgtgcgcgcatgtgtcctgcacagtcatgtgtttgtgttcatgtgtttgtgtgtgtgtataaaggctgagtgtgtctgagtattgtagacatatgaaaaggtttaatgaagatgagtggatagagtttagataggttgaaatctggggcccgtagctgctgagagatgctaaatattaatatacccaggtttgggaatcatcactggtgatacaagttgaaagagaacataaaaggcaaatgaccagaatctgaaacttgggaagaatgatagagaatatgaagagtggtgggagctatttagagaaaatactgagaagaaaatataaaaagtgacaaagtgtcaagtagagagctagaaaatgaaatctgagatatgtccattagatggaggtctcaacagtacttaaaaatatactttctgaataaaaatctgggaggaataagaatcttcagctagatttcatatatagctatgtaaaatggtaggtaagatcaaaagctgcagagaaagaatacctggttttaaatctgctatgtgatttgaagaagaaaagctaatatttactgaaggatgcagtgtgcaaagcattgtggtaagcgtgttacataaatgatgtaacttaattctcacgccactttaggaggtaggttatttatacatagggaaacagaggttcaatatctttgaaaatttagctattaaatgatgaaactgttacagtaccacgtcataagcattcaaaaaacttgtagtttcagagaaagagtagatactaggaagtaaatggaagaaaatgcttgatatagactgtatattcaggaaatttattactagataaatcatataagaggaatactatatacaagccagagtaaactagtttcaagtgaaagtgtatttacaagggaagaacctagtgaaaggggttcattgaagctattgaagaaaggggagattgactgagcataaggggaaactactttctgaaagaagggacaactttctctgagataaaaggaaagttgatttgatagctataaagatggagatgcattgacaggtctggccagagcatatttagaatggcttttctttccttgacgaaaaagttagaggtaaggtcttctgttgagattgatggtgagaggcttaaggagaaacagtgagatctgaaacacctgccaggtacagcattaagggcagctgaagttggagacgttttacatcagaatggtttgcatcatcaagcagcttcagtctaagaagagaagccaaaagagtgtggagagtgatccttgctattgtagtagcccagctgaaacttgggcttagaagggtagaaagtagtaagggcccaagtgagcatggagggtcagtttaaacagagatatcaaagacaacccttgttatggactacataatccataggcagaggatttttcctctttgcaaaaagaaataaaagtttattttggataaatgtgaacagatttcacttgatgaaataaaatttacagctacttaaaactcttctgctttaaaatataactgttaactgatctaaagttattaatattaagtgcattaatttctaaggaattaatgaaaatatattcagatttacttctaagtgaatttatatagtatttccttttccctcctttcttatttaatacagtgagacattcactagttttattttatttattttttgaacattcgttaattttaaaatgaaaaatgttttataggaatacatgcaaatatgtggcaaagttaagaagttgaacaaattgattcagtaccatgacttactatttgctctaaagatgttaactaatctctgtgaccttattgcaactccttcttcatcttttttttaaatagactgtttggattgcataagaaagtcatcaatatggtacacaatttattatccagtcacgactcagatccacggtactctgacccccagacaaaggctcgagtggctatgttgtatctacctctgattggtattatcatggaaactgttcctcagctatatgattttacaggtacttagtatatttaagacaaactctaaaagcaaatctgtgtttaaaagtattagaaaaatctgcaaatgatcttactttaggaaaagaaatacaagaaaactcacaatgatgtaggtactctgtaaatacttaagagattttgaaaaaaaactcttgactttgtgagaaaattcactgcaacgattctgtaagtatttcttacgatgcattagaaaaaatggttttacagcatttctatacctacctattggatgacccagtggtaaagaatctgcctgccagttcaggagacgaggagacatgggttcagtccctgggttggaaggatcccttggaggaggaaatggcaacctactccaatattcttgcttggaaaatcccatggacagaagagcctggcaggttacaatccatggggttaggaagagttggacaggactgagcatgcacgcaacatgtctacctattaggaaagagaattgtgtgtgtgtgtgagtgtatactgtttatctggaaaaaaaatatgagaaaacttgtcagatatctaccactctcagtcccaattttattcatatacataaaattgaaattaatatttgcaatagcgagaatggtatcgctaatgctggttaataagtttaagttatgttgctttttaaaaactgtaaaccacaaaattttattcttgctttccacttttagaatttatttaaattccttcatttctcttaaagaaaataggtaggttgcatttgaactagcagttagcctgataaagtacttccagttcaattaaaaaaaattttactgttatctaatatgtaccatcagtagatgctgctgatacaaagataaccaactccttgcctttgatagacttataattgagtagttttcctagtatttgatcattaaagtgggtttccttatctgaaggcagaaatttatattattgttactatatatcttttactagcaagtgctgcagtacatggggttgcaaagagtcagacatgactgagcgactgaactgaactgaatgttccttacaaaactctaagtagtactatagaaatgagttagtgtttaaaatatttaaagtgaagttgctcagtcgtgtccgactctttgcgaccccatggactgtagcctaccaggcttctcagtccatggaattttcccagcaagagtactggagtgggttgccatttaggtaaaatataataatatgcaatatatgttaataggttttcctttgaagaataaaggagaatagaaagggaattgcatgcccaacagctgttacttaacgagaagtttatttatttctgggttattttttccagaaactcacaatcaacgaggaagaccaatctgtatagctactgatgattatgagagtgagagtggaagcatgataagccagacagttgccatggcaattgcaggaacatcagttcctcaactaacaaggcccggcagtttcctcctcacatcaacggtaaaaacaaccctcctacagaagttttatctggaaagatagatatttataaggatatactgttccataacagattattatattaactgatgcaaaaatactcagttttattttgtgaaaatatttttttttctgaaaatattttctatactatactaaattgtttgaaaaactcttaattacctcaatctttttggtataaaaactctattttatcattcagaattttgaaagttgccccattttcaatttatagcctctattcttcatttttaaaatccattttattctttatcagtcctaagagatataatctcagttgtttagctgttgagaatatttattttgaatctgtgaaggttcatactttttcatatttaaataaagtgataatcattttgctctgtaattttccctcttaaggagggaagaacatggtggcagggaggaaacaaattgctagtagagcaagatcaacttctaaaagttttaaatgactttctttcaaaaagctgcaatcatatttatggaagctggcctacttgacaacttctaaaaaggttttatagagataatttacatatcaaaagatccatccattttaagtgtataatttcatggtttttagtatctgtacagagttaggcatctatcaccacaatctgattttagaacatttccatcattccaaaaagaaccctgaggcccattagccttcactctctggtgccccacagccatagtcctaggcagcaactaactttatttctgcctgcatagatttgcctattctggacatttcatatagatggaattatgcactgtgatctttatatctggcttttttcactaagcaataatgttgttgaggttcattcacgatgtggcatgtatcagtacttttttttaattgccaaataatattcctttatattgataggccatctttttttatccatttatcattgatgaatatttgaatcatttccagtttggggctgttagggataatgctgctaggcacacttgtgtccttgtctttgtgtccacacatgttttcatttctcttaggtagatacctcggaatggatttgctggatcgtgtgtattaatatatttaatattttgagaaaacttttaaactctttcagagtagctgctccattttaaattctcaccagcaattaataaaggttcctatttctctaaatcctcaccaacactttttattatctcttttttattatatattcttcacaccttagtatgtgtgatgtggtgtctcattgtggtttgactttgtgtttacctaatatctactgatattgagagtataatttcatttgtatataatacacatcttttcatatatcttacatagagaaacgtccattcaaatcctttaatattttaagattgtgttattcatcttcttgttattgagttgttattgaaagggtttttgtttattctgaacataaattccttatcagatatgtgattttcaggtattttcttatgtggattatcttttcattttcttgatagtgtcacttgaattggcaaagttttaattttgatgaattctaatttatcagttttttcttttacttgcatttgctattgtatatatgtatataaagtgcatgtacagttaaaatataataggagaaacagcagcgtatgtgccactcagcttcagaagtagaacttttcagtttccttaaaagttcacagtttgctctcaattcaatccctttctcccctcaaaatgaccactattctcaattttattggccttgctttttattgtttaaaacctcgcttatgtgaaatatactgtacatgaaacataaatgtagatatttacaaaagattttaaagtaatacttttgtaaccaccattcaggacactgttagtatagaacactgactcctcattttccgttggattgtctgcctttgtttataatttatagtagttcatatgtcaggattaagtccattgccaattataagtggttcaaaggtttctttctttttgtaacttgctttttccacacacttaattgtgaatttagtgaatagagtgtcttattttaaaataagattgtattgaatctatggatcagtttttggaaaaattaatatttatacaccagtgaatcccaaaatcgttgaatatgttagatctccccactattaggaccttctttgatgtgtttatatacataaacttttacagctttttaccaaagaggcccagaacatcttttgtaggtgtattgttggtccttgatattttaaaagtattttagtaatattataaagttatgcagtatgataatatataatacacatataagtatatatatataacatcatgatctcattgaagaaggcaatggcgtcccactctggtactcttgcctggaaaaatcccgtagatggaagagcctggaaggctgcagtccatggggtcgctgagggttggacacaactgagcaacttcactttgacttttcactttgatgcattggagaaggaaatggcaacccactccagtgttcttgcctggagaatcccagggatgggggagcctggtaggctgccatctatggggtcgcacagagtcggacacgactgagcgacttagcagcagcagcagtagcagcatattctcatagtctcataaatgtcatctttttcataaactgttttctaattgctgattatcttttttttttttttttttggccatgccccacagcttgggggatctctgttctctgatcagaaattgaatctgggccatggcagtgaaagcaccaaatcctaaccactaaactatcagagaactccctaattgtttattgcttttgtgtggacatagaattgattttgaacaataatgtttatttccagaagaattgctaaattaataacataggtataggtttttttttctatgtatacaatcatatcatctgtgaataatggccattcatttcttccttccagtgttttttcatagcttgtttatgagctagaatcttgagtacagtgttaaatagaagtagtgatagttggcatcatacaaggggaagcttgcaacatttcattcttaaatataggtgctaaaggttttggttttgggggttggtttttttaataccctctattatattatggaagtccccttcttgttcttagttggctaagagttttacttttgtaattatgaatagttgttgagttttatcatgcttttttgcaccattgagactatcatgttattttgcttttttatcttttacttttaaatctttcaattgattttctagtgttaaacctaccttgaattcctgaattaaacttaacttttttgtgatggtgtattaatggatttgatttgctgtattttaagattgtgtatctgtgttagtaagatcataatgttctattcagattttggaatcaggtagtttagctgatgaaaatgaactaggggatttcccattttatcagttccctgtaaatacttgtttaaaattgaaattattctccctagaatatttggagaacttgtgagtgaagccatctgtacctgcagtaatctttttggaaagtgttaaaattatctatatatttaatgattgtaggactgttcaaggtttctatttctttttacactggtttttgtaaattttattctagtagcaatttactcaaatttcttggcatacaaaattgtttcaaatatcttccatgatttttaaaaagtctataatatttataggagatgtaaacattttcatttctgtgacttagcttttcatatcttttgtcttaagtcgtctcagtagaaatttgtatattcctttagtttgtataaagaacacatttggggtcaatgctgagcccccctttttaatgtttattatttacttttactttcttttggtttatattgatgttcttttttctaacttctttagatagatgcttattaactcgctaattttcacccttccttctttgatgcttactttaattataaatattttccattaattattcttctaactacatactatgatttatagctaacattttcattatttaattcatgtagttgtattttgtcttatatttttaaaatctggtctgttcatttttgtctttcactaaaattttttaatttatttacatttatgtaaaatcatggcatctggtccctggcacttcatgggaaatagatgggggaacagtggaaacagtgtcagactttattttttggggctccgaaatcactgcagttggtgactgtggccatgaaattaaaagatgcttactccttggaagaaaaattatgaccaacctagacagcatattcaaaagcagagacattactttgccaacaaaggtccatttagtcaaggttatggtttttccagtggtcatgtatggatgtgagagttggactgtgaagaaagctgagcgccaaagaattgatgcttttgaactgtggtgttggagaagactcttgagagtgccttggactgcaaggagatccaaccagtccattctaaaggagatcagtcctgggtgttctttggaaggaatgatgctaaagctgaaactccagtaccttggccacgtcatgcgaaaagttgactcattggaaaagactgatgctgggagggattgggggcagaaggaaaaggggatgacagaggatgagatgactggatggcattaccaactcaatggacgtgagtttgagtgaactccgggagatggtgatggacagggaggcctggcatcttttttttaatttacttattttttattgaagggtaattgctttatagaattttgctgttttctgtcaaacctcaacataaatcagccataggtatacatataacccctcccttttgattgtcttctttagatatagtttttaaaataagacctacgttttaataatagaaccttttagtttttcccttcatgtttcctgttaacttttatttacagttttctgtaagccctaaaaacaattttctgttgctaggaaaggttcattaagtttcagaaccttaagtttaaggttatgtatgagttacacaaatattgcctaagtcaaatgactctttcaaaatatttgattttaaagtaattactttcacattgcttttatttatttatttttttactttattttactttacaatactgtattggttttgccgtacatcaacatgaatccgccgcaggtgtacatgagttcccaatcctgaaccgctccctccctataccatctctctgggtcatcccagtgcaccagccccaagcatcctgtatcctgcatcgaacctagactggcgattcatttcttacatgatattagacatgcttttagaagagaacaactgacaactgaaaaaaacaagtggtctttgatgattctgtctcattttactgctttttattttcagagtggcaggcaacacactaccttttcagcagaatcaagtcggagtcttttgatctgtctgctttgggttctcaagaatgcagatgagacagttctacaaaagtggtttacagatctctcagtcctgcagctaaaccggctattagatctgctttatctttgtgtatcttgctttgagtacaaagtaagtgatcattgtgccattgcaaagaggagcaagagggaacataatgtggaaaagaagagaatttccttactgtgtcttcttttctaatgtttaaattttagggaaagaaagtatttgaaagaatgaatagtttgacctttaagaaatcaaaagacatgagagcaaagcttgaggaagctattcttggaagcataggtgctaggcaagaaatggtgcgccgaagccgaggacagcttggtacgtacacaatgtcttctccttctggtgagaattctttcagagtccctgaacagtattacagtgatcatttttgcaagtcttcaatgacaattctgcacttttaaaacagtgttttaatgtagctgtgaattaatgcaagttagaattctatttaattagagtgaacatacttccagtttgctctggataatctcagtttgttcttgtaacctttgtgtgattattaattgtttgccttattttaaaaaaaggtgttaaagagtagttttagattcatagaaaaattgagctgaaaatacagacatttcctatttatcctctgtcttcacacatgcatgacacctctcattatcagcttttcatataggagttgccatcacttatcacaattgatcagcctacactgatgccttattatcatacagaatctatagcttacattgttctctcttggctgtatatcctttgtaacatgactttgtactcttaaaagtttcctacttttgcagtgaattaatatatcccatagattaggcaaaaatattgcctatcccaagtatcaggaagagaaaataatttagttgcatctgaagcctgtttctaatccctggtctgctacccattagccatgtaatcttggccaaccatttaatcttcctactttccctttcctcatccacttgtggttgtttgagattttaaaaggtagtgtaactaattgatcttatcatctttgtggtgaccgtgtgtatgtatgaacatttcgtaaattatgaagcagtattattgctgaaagcaccttaaggtcaaggacatggtttagtcatctgtgtacatgacatatgctaacagctcaatatatgttgttgacttaaaatgtgagtgtatgtttacatgaatattttatatgtgttgttttttgattggccatttaacttaatgatcctttatttaggtaaacttaagtatcttttatatgctatgtgtgtttggaatttaataatgaataagacagtctttgcctttgaaattaatagtgttgttttttcactttagttgtatagagtttcagttcagttcagtcgctcagctgtgtccaactctttgtgaccccatggactgcagcatgcctggcttatatcatgtacctattgattttcttttaactcatttaatatgtacaacaactctgtaaagtatgaaaattaactttctaggtcatttaattatatcaaacctaacgaataattattttcatctttaaaataaaactctcagaggtaaataacttgcctaaggtcataaactaagtgccagaaccagaatcttttgacttctaatttagtgttctttatattataccatagctctttctagacttactgttgaaaggaacagagcttttaacaatatgtttgttacatttttaaatgtatagtgtttggacagctactgctgtttaaatgtaagaaatgaagttctggacatggaagctaaaaaaagaaaaaccacaagtaaaccccactttccccaaactcataggtacagggaacagttaggtgcaggataggggtggacaaaatgagtgaagggagtcaaaaggtacaaactcacagttttaaaattcttaagtactagagatgtaacttacagcatgttaacaaatatatacttgaaagttgcaaagcaagtacatcttaagagttcttatcataagagaaaaacatctgaagctactcatggtcatggatgttaactagacttgttgtgatgatcattttgtaatatatacatgtattgcatcattattttatacacaagaaaccaatataatattgtatgtcaattgtgtctcacttaaaaaaaataattaaagttctcatcttcttaaaattaaaataattccatttgcaattcttatttatatttggacacttaataagttaggtcacctaatgttagacattcttaactaaggagatgagagaaagtttcctgaaaaaaaaaaaaaaagttaatggtaataatgaaggtagatcacagatacttattttgttaactgtcttaagatagacaaatctttttgctttctttcacaaaattccttaaagacagaggtttcaaaattgaagaagtaaagagggacagagagaaggaaaaggagagaaagcagaaggaatatccagactaatcctttgttgtgtgtcaaattatatttgtttctcagtatttttaaaatttctgtttgaactctgcatttttactttcattttactttccatccccccagccaaagtctcgtgtttttcaaagaggagtagtagtcttctagttgaaagcttgaggtcatgacttgattctgttgtttaagtatacgtgtttctccacaattctcaatgacttctccacttgtgctagattagtctgaaccacttctattgctgctgccccttaaaggagcccataccattcactctgccttctgtttctcttggggagagcccctctgttctcctctcctgccttctttggaccaaaagaaataattactttcagaaccttctgtaatttgtagcttttattcttgtggtcttaagtgctgtgaagagaaataaagtaaattaagaggaaacgaagtggtggagagttgaggaaggcctttcagcagaggtgacgaataactggccagtgaaaatttgtgtgaaaaacaatcaggtaaaaggaacaatcactattgtgtacatcctaaatcaagagcatatgtattgaaactacacacacacacacacacacacacacgataatggtagtataaacaaaggtggagaaaataaaatcatatcatgcatagtcttataaaccatggttaagattttcaggaagtcagaatttaaaagtttgcttatttacaaaagtgttgggttttctatattatatttagcaaatatatcctgtaactgttgtgaaaatttttaataaaaagcaccattgtcaggtttttccacttgtacggaggataaaatggctgtgttaataaaattactaacattatgtagtatttctttttttaacttttatttacttatttatggctgttctgggccttcgatgctgcatgggcttttgtctagttgtggtgagcaggggatgctctccaggtgtgatttgtgagtgtctcattttgctggcttttcttgttgtggagtgcgggctctggggcgagtagtcctcagcagttgcagcatgtgggctcagtagctgcggctcgtgggctctagggcgcaggctcagtagttgtggagggcttagttgctctgcagcatgtgggatcttccttgatcaggaaccaaacccatgtctcctgcactgataggtggattctgtaccactgagccaccagggaagccctgtagtatttcttacatgctggcaaatatacatgaatgtggtctacctgaaataacatttttaaagaaggttttgaaatttgtttgacagagagaagcccatctggaagtgcctttggaagtcaagaaaatcttaggtggagaaaggatatgactcactggcgtcaaaacactgagaagcttgacaagtaataaaccttctattttatcttattgatgggcttgttgaatttcaagtgcaagaagaaaatgattacttttagtgttatgttatataattaagcattcaaattttagaagtcagaacagttatatttaatttttccattttggattaaaaacaatttgggggaagaatttttcatatggtatagtaaagctaaaggttacctatttaaatgtcaccttattttccccaacaatcccccctggaaaatggattgagcagctctttttgaaatgtcactattgtgggtgtcacactgaaagtaaatatttcaaggattataaaaaattagaaaatctttgctctcttagagcttaaaatatagttaaagaaagacagaacactataagtcttctgtttctagtatggagacaaactaggtacactaactggccactctattgccaaaaacaactaaaagtgcattttcatgagtccaggattctaaaggactgcatcttcataaggggaactggaaataaacccttctcactgcccaggtaaccacaggtaaaattgcttgacttgaaaattgcttggcattgtgtcagagggctgcaatcttttcctgataatttctaatttcaaattagccctcaggtaacttgataggcccctaaaactttgagaatatagtgaccaactcatttgggtttgcctagtactcttaattttagcagtgaatgtcccagggaccgaccaccccaccccccacccagtcctgtcctaaattggtcaccctgagaaccatcttctgtccaaactttagaggattctcacagagaagctttcagaaatattagctctcctacacgctcagtagctcagtcatgtctgactctttaggaccctgaggactgcatcttgtgaggctcctctgtccatgggattccctaggcaagaatacaaggttgctgtttccttctccaggggatcttcctgacccagggatcgaactcacatctcctgcttggcaggcagattctttaccagggaaaccagctgtcccacaataaaatcataaaacacaggaaggagccagcagagacagaagcagcaggatcggtatcacatagataagtttaggattgtcagaaactgtcagtctctttacgctgctatgacaacacacactgggttactttaaacaacagaaatttatttcttatacttctaaaggctggggagttcaagatcattgcaccaacagcttcagtatctggtgaaggcccttttctgggtttataggcttcttgctgtgttcccttatggtttaaggacaaggaaattcctaggggcttcttttatagaggcattaatctcattgatgagggctctgccctgattttccaatcaccttccacaagctgcacctcctaacactattaccttaggcattagattttcactgtatgaatttggcaggaaagacacatacttggaccagagcagatgctgtatgtaactgtgttaaaaattcttaaagtttgagggtctgcttttctgtcttttttgtccaagcccatttctttaattatttttccatatgtattgtgttttttaaaaatcacaaagatactgagatactgtgttattagtatactgctttacttctgcacttgtattatgtgttctctttgcttatcttactttgttttaaggaagccattttctttttcttcttggtattttcctgattcttttggtttaaatatcttgtttttcatgtgtcttcacaaaatctcactggaattttaagtctgaacattatatttcttttctaatttaattctaatattgtattttctccttaaatttataaaatgtaaattcataaactgttgtctttagtggtagtaataaagattcagactttaattaatagctgactttgaaaagttaacatttaatacacccttgtatttttgctttgatttatatatatattttttggtttatttggatatagtttccatatatacattgcgattgagatgtcaactttactcataaatcacatatagtcattaaattttaattaaataatacttttgtaaatattagtattcaagtaaaccactttattacatcaagttttatttctaatgagtaattccatccagaatctcactgaagagttactcattttctatattaaaattttttattagaaatctgggaaaattaggcagaactttatttttaagaaagttcttttatcctaaataaatatgttgaaaatccttgaaatggtaacatgaatactaaacattttgggtactgctttaaagtagccctaaatacaagcctatatagcaccacctagtgtctgtgccatttagaacaaaacagtgttttcctgtgtttgctataactctctctgaaagctaagtatttatgccgttagtggcactgtagtactgtaatggggtgagaaaagcttggcatgtttgacaaatgtagattaaaacaaaacatttttaaacatgcagaatatttttccttatccacttagtaacttcgcactcaggcaactattagaaaaactcttcccctgaaaaggaaaaatgattccaaggtttttaaatttctgtacatctttaaatcttttgtgaatttcagatctattggattttctagaagataacatataatttcttctaatcttttgttttaggtcaagagcagagattgaacacgaagcactgattgatggcaatctggctactgaagcaaatctaatcattctggatacattagagattgttgttcaggtaaaaacactaattagaggaatttaaactagtatagatttgataaattaggtttggggaaaaaggtatttattgaaccatataattatatttaaatatcagtagatcccaaaagttatgtcctcgcttctcttttttttctcatgtaaattctgtccattcttttttccccttttcttatcaaaatccctctcagcttctttttcttgaggagcttctagatcttacattatctttttcctattaaaattttaatttgttaatttttacatattctgtctctaaccagattacagttaacatctctgtttttaaattgcagacagtttctgtaacagaatccaaagagagcatccttggtggggtgctgaaagcgttactacacagcatggcctgtaaccaaagtgcagtttatctacagcactgttttgctacccagagagccctggtttcaaaggtgggttatttttgtgcctgctgtcttgtcagactttgttttctttactaacattgtctaggatcacttgatacattcattgattatatcttaaatatatttatagataaaattttagtaataatctaagacttgattcttctttgcctttcctctactgcttatttctttcttacttggactacctttaacctgttttctgaattgaaaaaaaaaaaaaaaaagagtagttctgaggtggagaagggcctgaaattaatagcctgttttaaatattgggctttttgtgttttcatcttattttatctatttcttattgatgtgaattatcaagaattagtgtgtcggtcgttcagtctattgaaattagcttatcctaggtcaatggaaagacaaatacttgctttgtttgtttaactacttcaaatatttatttcctatgtttgttttcctctgaaaatctatattcttaatcttgaaggtgtctatttcatcttagtcatcttataagatgaaacttagccagtgaagataacataccattttgtaatagtaagaatatttcacgctgtgcagcaaaaaactaccataatattgtaaagcaactatatttcaataaaaattattaaaaaattttatcatagacttattatgtgttactatagtaagtgttttattcacattatcttatctaaggtagtcatacagtcccacataggtaatattattaggcccattttatggaagagaaaacctgtccaaggtcacagtactaacatagttcatattcaaacccagtctctctagttcttgggtccattttattaaccagtagcaaatattctctcttaaacatgctttccatttctgggctacactaacaaatctctccatcaggctatattaacacatgtgtgaagctcctgctacataaattcagtggtgggattgtttctttacagttcccggagctcttgtttgaagaagaaacagagcagtgtgctgacctttgcctccggcttctgcggcactgtagcagtagcatcagtaccatacggtcacatgctagtgcctccctttacctgcttatgagacagaactttgagattgggaatgtaagtgtttcattttaggactgtatctttggattcataatgaactataacttctgtaggtatctattaagtgggtttggggagagcatggcattttggggtgtactttgagtctaatcttaagactatttctttttctcattctgtggataacataaaaatccaaatctccagttttattttgtatattaagaataacgtatagtagtacagatttaaactgcaaatgtatgttgagcgactgtaaattgtaattattatcattaagtgaagtgaaagtaataagaaaaattaaaagtttaaatatctttgctcgatattttatgattatatgccagaatgaatatatgtatatgtatgaattaatttaaaaaaaataaataaaaataaaataaaaaaacaaagagtggaatgggaaaaaaaaagaattccatgtcttcatctatggttttttatttgattatggacttatgtgttgtatttttcctagctttttgagtccaatgtttagttcatttattcttactcatataattatttaaggtctagaatattgcattgtgctcttttgaggtctcattggttctagtacctagtatttttagtattcttggtttctattcaatacatattttgtaatttcagtttgtattttcatttcaacttgaagttttaaagttgtgatgatgatgatgttctgttgctcagtcatgtctgactctttgcgacctcatggactgtagcacaccaggcttccctgtccttcaccatctcccggagcttgctcaaactcatgttcattgagtcagtgatgccatcaaaccacctcttcctctgtcgtccagttctcctcctgccttcagtttttcccagcatcagggtcttttctaatgagccagctctttgcatcaggtggccagagtattggagctttagcttcagcatcagtccttccagtgaatattcaggattgtttttcttcaggatttactggtttgatctccttgcagagttttaaagttttgatgataatttttgggttttgtttgttttctggctctcctgtggcttgcaggatcttagttcccaaccagagattgaacccaggccctcagtagtaaaagtgtggagccctaaccattggattgccagggaattcccagtaatttttagttttactgcagagtgatcacagtacaattaatatgtctccattttggtactatggatgtgtgtgtttgtgtattcaaacataaaatgtttttattaatgtgttacacaagcatttaaaaagaagtggtgctttattttcgtctctttggttgactaaaagagatgatttaaagcctacatattgtctatttctccttttggtcttatttggtaaagtgatattcataactgtttggtatattgataactactatttgtaactattatatcttactatgaattattccctttagaattgaagaagactctgagatggcttaatttaaaatttttatatttttgacctgacttctgccttgtgtactattgacctctacttcctttctaatttgaatgtggcttaggttatctttgcctgtccttttgttttcactgttttgaatcactttattttaaatgtgtgtctcatctacaacatagagttgggttttgctttgtaattcagtttctaagttgaataaaacctttcatccttgttattatatcagctacatcctggatttgtgttgtattattctgttatgcttccccactcctctccttaaaaaatgagttggttgttttcatcttgtacgtagtaagttcaccttcaagtttatattgctttagtggttacctttataattatgtagtaccttcagtcctctgtttctttaatcatacattctcagtggaggcagtattgtcaccagcctagtggatattggttcttagctatcacagtggtgtcccttgagttcttatatttctatgattttttttccttcctaaagttaatggcttcataaattttttataattcaaagtaaaatattttaattagaattttcatctgtttcatgaccacattttcctattaagtattctttatctggtatttcactgatcttctttacctttttgttattcaacatagaatgaggcagtttatattggcccaggtatttgtaggacattctatttctgtccagccctttgggatttttttggttgttttttccttgagacagatagttttatcacttcaaagtgagtttcttatttaaatttaaaagaagtgtttttcccattatttcttaaatcagcaccctaggattcttcgctatttgctatcccctctttgccttccattgaagctgcttcctatttagcttgtcttggcagcccttatgcatttttctaatgtatagattatattagtctcctcattttgctgaaatagagtttatggacttttttttctactcatcttttatttttatatgaaatgcaggagaataagaacttgctatctcacactgtcctatttttactggaagccaagtcttctctcctaattcagaacaaagaatctagttactttatagatcttatttagtttttgaaataagagtccctaaaatttgactacacttggagttttcctctgttattttaggaaagctttatattaatacaggagaattaaaaatgggtaatttatcatgttaatgtcatgtagtaccgctaaaaaagaataggtgacttatacttggcacaattttatatagattgtatattcaagagatattagaactaagtattaaattgtgttctaggtactgtggtaggcattgggcaaacatagataaaaggaaacttattttaaaatggcttaccatctactaggataggagatgaacaggtaatgttcagctagtaatagtaagtacctactttagatggttttgtgaggattatataaattaatattaaataacacacttattatatcagtaactgactctgagcaaatgttcaatatgtgtttgctgttgatatactgagaggtaagcacaggaaactgtataagcacagagaaaaagagcatatactctcaaggagggtttcagaaagaggagatgcctgaactaaggatgaagaattgcccacgcagatggagaagtagtgggtagactttttaggtaacaaaaatggcacatacgtaattagaaaggcattgaggtgagagaaggaaacaggcaaacagagaaggaaacttttttagcacttctttattattatggctcaaagagagaataatagataaaagtttaattgaaatgtttagattaagctgtcataggacagacacttgtttatcactgtactttcagttcccaccatgtagtttggcaggtttatttggtcaaatacatgaattttatctgcaaagctgtgagcagccagtgaagtattttaagaagaagattgatatgtacattcagatttacattttacaaaaatttccctgatgctccttaggaggtaaggaaaaagaaagattggttaggaagttattgcagtaatccaggtaagaaatgataagggcataaagtaaagcaatggcattgagaatggagaaagaacagattggaacagattagaagatgatgtagattgagtttatagtatgaataatgaatgggcagaatggctatggaatgactcctggttttgggcctgtgtaactacaatagtagcaccgtttatttaatcgataggacagactttattttctagggctccaaaaccactgtgggtggtgagtgcagcctcgaaattaaaagatacttgctctttggaagaaaagtaatgtcaaacctagacagcgtattaaaaagcagagccattgctttgcctgcaaaggtccatatagtcaaagctatggtttttccagtagtcacgtacagatgtgagaggtggacaataaagaaggctgaatgctgaggaattgatgtcttcgagctgtggtgctggagatattgaacctgaagctccaatagtttggccacctgatgcgaagagtcaactcattgaaagagaccctgattctgggaaagattttaggcagggggagaaaggggtgacagaggatgagatggttggatggcatcactgcctcactcaattgacatgagtttgagcaagctccaggagataatgaaggacaggaaagcctgtcgtgctgcagttcttggggttgcaaagagctggacaccacttagggactgaacaacaaagtttgtcactgaaaacctcttaaaagtggtttcatagtggggaatggtgaaacagaaatgaatttacaacaaaaaaggaagaatgtaaactcttacagtcatcattccaaagaatatacctttaagttactttgtataggatatgagttaagttacacttttatcatagcagtgggcataattaaatcaggtagagtgtagtgaccacatctgacacttaagaattttgtgatgttggtcaagttctttaatgtcatctgtaaaaatggtgctattgttaataacatatacctcatagaaggtcggagaaggcgatggtaccccactccagtactcttgcctggaaaatctcatggacggaggagcctggtaggctgcagtccatggggtcgtgaagagttggacacgacctgagcgacttcacttttcactttgatgcattggagaaggaaatggcaactcactccagtgtgcttgcctggagaatcccagggacgggggagcctggtgggctgccgtctatggggtcggacagagttggacacgactgaagtgacttagcagcagcagcagcagcataggtcaatataaagtctaggcacaacttctaattcaagtctaacccacaatttttttcaactttgttttttaggctgttatcacaggaagattctaagctttatgtccatttaaaaataggatttcaatactacacatttcattactttttcaaaaatattttttctagaatgatgttttatactaactttttctttataggaagtgaaaaaaatagacacccctttaagctttcctttattaaatatttgcctggcaatttctctgttacagaacttcgccagggttaaaatgcaggtaaccatgtcactgtcttccttggtgggcacatctcagaattttaatgaagaatttttaagacgttctttaaagactatactgacatatgctgaagaagatttggaattgagggaaacaacatttcctgatcaggtcagaaatgctactttttagagcatgaactgaaataggaattgtaaataggcatttcccaaattgttaaatcaaacttcagtttttcctggcagaacctgtgtttttctttcaatccatatgtgtcatagataggactgaatctctgttttaataagccactcttctttctcataatggttaatatttttggtgtttaattctgtgaatttgtgccaaaaagaacactagacttagtcagtatggataaacaaaaaactttatgatgaaagtgttcccactgatttgtgaaacagtagtttgcctcaaaaactaagtttatacaaactaccttttgagaaaatctgaaaatcagaaagaacttcgttttgtattccttatatccgtatatgtttcttatttctactagtagttctacttgtgtctgggtgagagaagtgaaaaaatagtgggctgatgaatttgtataaaattaactcttcacccatcttaccccagtatacccacactctttagaactatatcaaaattgtttcttttgaaagctttagatttcaaatctgaaatatcttccaaactaatcgaatggttgtgaataaatgacagctgaagaatgtttttcatataattctctgctacaggttcaagatttggtttttaatctccatatgatcctttctgatactgttaaaatgaaggaacaccaggaggatcctgaaatgttaattgatctaatgtacaggtagcgtttgtttaattcacttataccttgtgttgttgttgttagctgcttagttttgtccacttcttttgtgaccccatggacggtagcccaccaggctcctctgtccatgggctttcccaggcaagaatgctggagggggctgccatttccctctccaagttaactttctgacccagggatcaaacccacatctcttgcaatagcagatgggctttttaccactgagccacctgggaagccctgtgtcttgtataatggggcttaagttaatatgatacacagaaaacatgagtttacaagaatacaaaaattatttgtcattttctaatggtaattaaagcccactccagtattcttgcctggagaatcccatggacagaggagcctggcaggctatggtccatggggtgcgaagagtgaagcgacttagcaaggcatggcaacggtaattaaaaaatcaaaatgtgctttatcagatcccctatgacacttcttcttttaagaattatgaataattgttcagtgtatttattgattatcaaaaacaagatttttaaaatatagttaagaccttggcatcctgggccctagagttcctaggaaggctgaagacccacattttaaatgtaaaaattagttctttaagaagaaaacatagtgtattaatactttattacaacattaattttactcatgttaaacatggtttttgcctataggctgatatatttattgggtatttttagaattttgttaattcctgttgtatcttcaaagatgtaagtaaagcttgactttttctttgccatttgaccttcattttttacagttttcgagtttcttaaagacaagaataaaatatttcctttaaaattaaggtgatacaatgaaagaagcttttataatttttttccttgaatataaatattatttagagccccataataaacatgtaaattcccagatcttccgttactgattgtttccttaaaggacagattttcatataaaatgtctcttttttttaagctcccccctacccccacaaaaaaaaaacctgatactaaccattccatgggcccacaattttttctctaagcacactcaaaagcatgttcatacaacccaaaaacttgtcttaataggttgtgttcggtaatagaagcctacacactaaacaggcaatttgaactcccttccagattaggaagcaaatgctaattgagaatttctgttctaactagaattgccaagggctaccagacctctccagatctgcggctgacctggttgcagaacatggctggcaaacactcggagcgcagcaatcatgctgaagctgcccagtgcctcgttcactcagcagcacttgtcgctgaatatctgagcatgttggaggaccggaagtatcttccagtgggatgtgtaacctttcaggtaggaatctgccttaatcaaggtatgtccttttctggtttaacttttctcactgctgtttatattcatccagctgataatgaaagcacagactgaaagtgatgcttcacaagatgaattaacgtttcactatcacttttattaatatgtttttaaagagtatttcttgttaattctcttccatgttttcttacctgtacattatcagtgctgtgtaaactacatttattctctttgcctatactgctatggacttcatagcatctatgaagtacattcaaaatattgaaaatcaggatagtggacactcttaattggcttttaattaaaataccaggtaaaccagcattctccattatttatgcttatataaaatatgctaagatatgactcagagatgatagttcatgctctagtaaggctacatacctctgacccactggctgaattctttgcctaccaagagtcaattctgctttgcttttcttcaaagcctcttaattccaggtttaggaagttataaaaattatttaaatattatgttctctgataaaatacaaaaagaaagtgagttattgtttttgtgaaaattattaataagctgaatattttgcaaagagatcaagacaagtagaaaaagattgagggaaaatctctaagaaatttaggataatttgataatcttttaaattcaagtttttactctaaagaaaccaaaactgaaaatcttaaatggaggttacattgtgggtatttagtcaagagagattacatggaactctgatcttgagacccatacacaagaaaaggccttagatctacttcaagaaattgacaaatgtgtgactcagttcagttcagttcagtcgctcagttgtgtccgactctttgtgactgcatgaatcacagcacgccaggcctccctgtccatcaccaactcccagagttcactcagactcacgtccatcaggttagtgatgccatccaaccatctcatcctctggcgtccccttctcctcctgcccccaatccctcccagcatcagtcttttccaatgagtcaactcttctcatgaggtggccaaagtactggagtttcagctttagcatcattccttccaaagaaatcccagggctgatctcctttagaagggactggttggatctccttgcagtccaagggactctcaagagtcttctccaacaccacacttcaaaagcgtcaattctttggcgctcagctttcttcacagtccaactctcacatccatacatgaccagtggaaaaaccatagccttgactagacaaacctttgttggcaaagtaatgtctctgcttttgaatatgctgtctaggttggtcataactttccttccaaggagtaagcaaagccaacagacaaatcatggctgcagtcaccatctgcagtgattttggagccccagaaataaagtctgacactgtttccactgtttccccatctatttcccgtgaagtgatgggaccagatgccatgatcttcgttttctgaatgttgagctttaagccagctttttcactctccactttcactctcatccagaggctttttagttcctcttcactttctgccataagggtggtatcatctgcatatctgaggtgattgatatttctcctggcagtcctgattccagcttgtgcttcttccagcccagcgtttctcatgatgtactctgcatataaattaaatatctaggttcaaataaaatatttaaggtatgtgtgtatcattttttcagaagtaataatggatcccaatctcattggataagagggctttttattatacatgagtgttttcattaatttgatgtatgttaggcaagccttgagaccatttttgtatctcaatttcccttatagggagttttaacaacatcaattaaattaaaagtaaacactgtttaagtcaccttaggtgttctatgtcatattacaattttccttagcccatgatttttaaaaattttcttttttacaacgttttattaatgaaaaagttagcagtggtgttacattttattgtcatcttcacaatacaagaagtttttggagatttgtctgttagctttgcattgactaccccctcttttttttttaataagctgatagctgtatttcgtcaattacttcatatatatcattcatgttaagaaattaattccatttcacaaacctaaacttttttttcctcctagaatatttcctctaatgttttagaagaatctgcagtctcagatgacgtggtatctccagatgaagaaggtatctgctctggaaagtactttactgagtcaggacttgtgggattactggagcaagcagctgcttctttctctatggtagatgactcttgttcatttcttcccacaattatgtacttcttagttattagtgacatgtatatttatgctttctgcttatgactgtgcttttcatttatgataattttctctaaatatctcaagaagtctctagtaatggattttcttttcatcattgcttattcctttttattttaagagtctgtcacttcctccattgtttttcatctgcttgtttgtgaaccagcacttagtctataagaggtttttttttttttttttttttttaagaaaactttaaccagaatacattttctaaaaccttaaaaaagcctctggtgctcaggaaagttacagcctctcacccgattggtagcataatgagctctattaggtagacattgaagtggtattaggaactttatgaactacatcctagatcccttgtctgactttcttaccatgctagaagtccagtccttgtccctccccatctgtatatgaagaactgaagtagtcatgtggatcagagatgccatatttattggtgaagggaaaaaaatagctcgctgaatccttgcttactttcttgaaccatgttgatagcatcacctgctttctgtgagttttctgatgagtgtttagtgtcccagcaccaaggtttgcaagacagtgaggtccatgtaagggtaaaagggaagcttgatgtaatgtactattacctgatgtagttaagtaatagtacatcacttccccattgtactgttattgggaatctgttgttgcttctcctggccttaaccctacccagcaatatgttggttatgcatatagatttaggaggcatctagcccctttctctgccatcttagtagttaaagcacttcaggcacaaattactcaacctactagtgccttacttttcttatccattaaatacatctaataatagtatgtacttcaaggactgctgtcaggattaaatgaattaacctatgtaaagtgctaatcacagtgcctggctccaagtaagttttagtacatttgctgttatcatcctctcattattataggtacttagaagtaactcatgtaaaaatgattctgagactcaaagaacattaggtgtttgtcctctttaaaatttcttgtttttgaagaccttggttgtcctgattccattcccagatctctgttccttgagcttcagtttaagggatctgaactagtaggggaaaatgtttttgctattaatggaatattttaataaatatacattctctgtatatatgtgtaattttaataattcacagcagtgaatttagattgggttacagtggcttatgttacagaagcctctattttgcaatagcatttaattatgaatgtcattctttttcagttaatctatttaatattaattaaaaataattactgggatattttagttacactgaatatattttactattgcagctacatgattgcttaaatatactcctatgagctgactagaaaatataagaaccatatgtttattttcttgggaatatgctgatttgtgaagcaatgggaacttagtgactcttggaaaatatctctcttccttcaccacagccaccaatcgatagcagtataaacatgttttgttccttactctgattataatcagagcaacacttagccaaccactagtaaaccaaaacccctacttgaataaaatctggtggctcagaatcttatgttttgttaaagatcagtgatttttccataagagagttcccttaagattttctgtgccaatttaatattttgggaaagttaataattttagtgtcctaggaagcaatagatttatgtgatatttgtgtatctgtgacttgtaataattgggtttctatgtctctgctctgaatttgtttctgcaaaagtttatatgcatataaaaggacacacacatacacacatttatcttagttaagtaattactgagttggagaatgaaatggcaacccactccattactcttgcctggagaatcccatggactgaggagcctggtaggctacagtccatggggtcgcaaagagtcagacacgactgagcgacttcactttacttcacttcaattactgagtagtaaaagcagaatgtccagttcaaactatatggaagtataaatatacatatatgtacatgtgtgtatttcaaatacaaaaacacaaatacacacacacatgttttcactcaatagaagagataatacattgtgcaaaatttttttattaggtcttaaaaatcagtagcgtttgtttttatgtcctattggaaaatagtagtattgccttggaaatattgtgagttcataaattgcagttcactctcttattgatgtaaaagaaagcaatctcttattattcttataggccggcatgtatgaagcagttaacgaagtttacaaagtacttattcctattcatgaagctaatcgggatgccaagaaactatccacgattcatggtaaacttcaggaagccttcagcaaaatagttcatcaggtaacaacagtactttctaacttcagtgttaagtggagaaaactgtctacaagctttagtgttgctttgtactaatgtcaaactagatcctgtgaaatgaccgttttaatcaagttgcaaatgaacagtttaaaaatgatggttcatggccaaagcaagattcagtaacaaaaatgaatttagcctaaggtagattatgaccatcataaccttcccacatagcttctcttttttcttcacttttttgaatgattactagttgctaatttttttaaaattgtgagttactttctgtttcacagtgtgagtaatagttatgaatttgattttttaaattgatttctattcatttcttccccaaaatgtctttatatttaactttttattaaatgatacgaaagcttaataaactcctaatatttttaatgatttcaactgaacttttaccttttttccagatatttttattcagtcatcctctgacatatttctaatgtaaaagtaatatttagtgaaaataataaatggttgtatttatttattcattcaattataataggatgatttcagtacttatttgtacttcacgggatccacatattatctttaaaattaaaataagcttggtttaaaaatgaagtagactgctagcagttgatttccctgaagctaaatcgttggctccattgaaatactcggaagcgttaagggtcctcctcctccactttctgctccctccctgtgctgcctgtgctgtcctctgctgctgccatcacttgagaattggagtgtagtgttggtttcccacttgtgcgtgcagtgttagtctcactttattgtcttagcagcttgacttcctctctctcgccatggactaagctgttctagaggaattgatgtaatctgaaaaacttagtcttaaatagggctgctatcctggtaagccaggattttattgtcattgaataaaatattggagttgcgaaagattattagaattctggatcatagcaggtgggtctttttataatcagttatactgttaaatctcatcgcagcttcccatatgttgcacagattgcaaatgacacaggtcaggcctggaacatctagagcgagcagcttccaagaaactttcatccatttgtatcagagacatttgggcaaaatttcgatttctattccagcttaccttgggtacttcagtgaagtacagctcccgttagttagtgatctaatttagacacaaatgaaacaagcacttcactttctttcccctaaatttgtactttttacttattaaagttttaaatggtgaaattttagcttctaggttttgaacaagaaatttataaaattatcatagttcttaagtgaaggaatatgatgtttaaaataccctagtgttttctgtatgaagaagaatttatggtatatggtttcttacactactgaacttcctttggctttttttgttctttttaaacagtttttttttatgacttgcccttttttacttttttattatacagagtactggctgggaggtaggtaatgttttagttagttaaagacactaatagattgatttgatcagatttcttatgccaatgctttgcccacatgtgctagctgtgggcattctgttgctgtctgctgtcaactgaattcattaaccaaagaaactttgttaaaatactgtaagttatgttaagaaatttgttattaagaggttgtaggcagtgcatggaaatccatatgttactaatgatattctttggtaaatgagccactttgtcatcactttcgtttgtttttatcctttgaagcattttctttcatcaacatttacacacaagatttcctttttttaaccatattgtttcacctcattctacagaggtcgatttatgttttattgctcagaggtgtaaatataaaatatttcaactgatctaagatgttatcaattgtaagatataccattattgcacattcctttaagaaagattagaaaaacaaataatctctgtgtattaaactccagcatcccatcagttgaaaaatgaatgccatctacagagatactaaaatatgggcaaaaaaatgtgcatcttggaattgagaaaaagagtatgttaatttgatcttgagtcacttcaccttgagtataagtactactgaggaatgaaattcacttttgtcatttgaattttgttggggggagggaaaaacagattgagggaacttgaaatttaatttgacctcattttctgacaatgtttgataattgtgttcaatgaagactgtgtgcttccttttagggagtaagtataatagttaggctcatgaagttatatataaatcaaatcatacctgaaaaatgccaggaagaattgattaccttttaaaaaaatctttctgaaaagaattctataaaataaaaaattctacagaataattcattttgatgaggtaaagcaaggtattaataagacagtttatttaaagctgagtattaatatttgttaatttttctgctttgcccttcactttgtagtcaggtttatgttgattaaacagtttaggctttctctgtttggttttgcagttgttttgagacccagctagaaaaccttcagaatgaatgttactgttgcattctcttccatttctgaattagttgccaccttttgtttttctttagatgaaaccagtactttcagtctaccttagttgcccagattaaatgtgtatgactttttaatacccagtatagaatgtctcatttttgtgtcttcagttaaggcttatatagagactttccatggttacctttgagtcataaagttacttaatggatttcctaacacaaaatggaagtaggtgaaaagtaagcatgaaagaagagacattgaacctctgagcagtttattactagtctgcttgatgctaaatcgacccctgaaaggtatacttttcactggttatgattaatattttatcatcatgtttattgcatggtaaaagtcacacggactttattttcttgtttatattcttgccactacctttcactggacctttagctttgtagcttctaaaattgttgcacgtttgttttttgcttttcccttgtaaaacttaagtggatgcttgcattttaaaagtatgtttgctaccatttgctgcttatttgttttgaaatttccctaattaaaatgctttctgttttctcttctctcttgcccctggttgctgaccctactccctacttttactattgtctattgtggtaagttcctatcttgtgaatatttttctttttgactctgggaaaacttcagtaatttcatttttttctaaaagctatggtacctagctaatttcctagtattcttaaggaactctcactggattgagatctaataaggatatctgatacactatagaaagggtctttgaattaatagctcccttcttgatctgggcttatatagcactgtatttcatttttcactgtgctccttgatttggtacaaatcatttgagttggcaaagctttttagggctgtgtgtgtgagtttgtgtatgtgtgtgtaaaagataactctaaaacctggtagcaaatttggtaaaatatttaccatataaaataacaagtcatgaacctttcttaaatcatggtaactgttacttgctctgccaatttcaatatccgaatgactgtttactatttattttctctttcccatttttcttgaaataataggaaattatgtttaaaaatgtcttacttataattgtgggaagttaagaaagaattcatgacattaaaagaagatactgctagaaaaatataggctagattgtaggaaaatgcattttaaaattgtttttggagaaaagaaatattgaatttctatatggagccattttatattttgtgtgcacatattttattttaaaagatacatttatccatttatcagatagtgaacagtttgtattcagaagtagattaatgcaagtttattgtgttcagaataatcattccccaactattgataacatagtcacataacactgtctccgtttttttcttgaaaaacttacaacatatttcaccatctgaggggaaatatcaccaccctagtaggtatatattatagtctccagcaaggcttgagaagatgggcttagcttgtttaagctgaagtctctctactaagtcactaaagaaaagtgaggtattctaacttttgagattcaagcatgcagggtaactatatatcaactcttttcattgtactggatggacatgaagatgagccaatattttggtttttatatgctgagaaatactagccatagttctggtgcagtgtcttctgttgaatttttatatgctctaatccatgctctggagaagggcatgccgacccactccaatattcttgtctggagaattccatggacagaggagcctggcgggctacagtccacggggttgcaaagagtcggacatgactaagcaactaagcacaatccatgcacgccgaggctgcatgagataaatgaactcatccaagggagtaaaagagcagaatgggaaacagcaagttttaataggtgatggggggcaggaggctgaaagaagagtatgaaaaaaaaaaggtaaaaacttttacaacaagtagttaagtatgaaaatgtgacactctataaagaagcaactagacctgtgtaggtataaaacatccatgagtatttatctcaggaaaggcaaagaggtgaagtcagatatgaagaaagtaaggaaaatgtgatgagaagaactctgtgaagaggtactttctgatagttgatgactccctaatatttggtatagacccatgacttagcacctgatgatgtggtactactggctgggttctgccctttatgttatttctgatgagaaaaagatatggacagcaaacatttattagatgatattggacatgattattttttcctggactgggacatataaaggttaagattgaacatctgataagaaatgtgataggatagatcttagaagaatatatctggtaggtttatgaaaatcatcaacctgattttcatactggagtgtgcagaaaggagatgcaaacatgtaataacaatttcagtagagacagtgttgtaatatagaggaagacaaaacttagggaggaaggtatccagtaaatctcaattactcatgggaattctcagaaactctcaaggaaaacatcagagaagtgaaaaatggttcagggatcatacgtatgtcctagaatttgtatatgagtatatagaatacagggattaaatagtgtaattaagagcttggattcaggtgtcagatatactaggatttaactcttgagtgccactgttggctagcagtgtgaccttgggcagattacttttcctcatttataaaaagaggtgaaaataatgatgtctgagagttgtgataagaattggcataacctatgtaaagtggataaccaatagtacatgtgaagtgaaagtgaaagtcactcaattgtgtccaactgtttgcgaccccatgaactatacagttcatggaattctccaggcctgaatactggagtgggtagccgttcccttctccaggagatcttctcaacccagggattgaacccaggtctcctgcattgcaggcggattctttaccagctgaccagggaagccctagcacatagtaaatacttgaaaaatgttggagattattatttttattgttattatcatcatcattactatatattacttgaattattgttcaagtaattacttgaaatcttatttttttaattacttgaattaaatctataattacttgaaatcttaacccagtttagctgtgaaatctaagaggtgttaggttcccaggtcaaactctatgactaaataaactgataaaagtgtatgttcttcaaggggaatagatctaatagaagaggaggagattacccctgtgggaaacactggtctgcctatctgaaaaatcagttaacttgagagaaatgtagtggagaactatgggtgaagaggaaagaagtttaggaagtgatgtcagtgtggaaatatacaatagcccaactgaatgtttgctgctaaataaagacaacaaaactagaagaaacttatttgtcataagagatttcaacaactagaaacatggatagatgagtagatggatttccttgtttgggacgtagtttcattatacacaggatagtggaatcagtaagtactgctgaggaagaataattggagtgggggaatggtgggaagttaagaaagaattcatgacattaaaagaagatactgctagaaaaatataggctagattgtagcaaaatgtattttttttttaattcagaggaaaaatgggtatcatcctgtggtccaaacctctgaagaggaagtaagataaagtgatatctttcttgaagataaagccatatgagtaaacttctatgaacatgatagagtcaatggttttacattaggaaactctttgtaagttgaaaataaatctacttactctactgcgcacacactcattttcagttctagtaactcctctctgatctgatttcctctgagcttctccctgctgcgtattctgccttaccactctagccactttcctgttcttcaagcacaggagcggggctcctgtcctttgcactggctctttcctctgcctggaatgcacccccccggagagtcacatgaacaactcttccacctccttcacgtctttgttcacatgtcacctcttggtgagacctgccctgaccactctgttttgtttgcagatttatcaccagtttgttgacacatagtaaaccttcaataaatatgtgaatggatgcatggttacctcatatacgttgtttaatgacttttaccttcatttttattcttcttctgttcctgccacccacctcctcctctctaccctccttccttccccttcccctagaatgtgctcccacatccactcagccattcttttaggttgtagaatcctgtctgtgtgtcacctcttttgtgacccggctccaacaggatttgcctttccttactcaggacactttttattagagcttatgaccttttgtattgtaattatttgattacatttttttactctcttgaggagccaagtcttacttatttttattttcctattcccgaggatgagtttgagtaaactccaggagttggtgttggacagggaggcctggcatgctgcagtccgtggggtcgcaatgagtcggacatgactgagcgactgaactgaactgaggatgaacagtggctaacacatgcaaagcactcaatatttttttttccttgaactgaatgtcagtatgagaaagtgaataaaaagagtttaaaatggctgctcaggaactagttcagttttaagctgcattaattgaatttaagtccacatcctgggaggcagtgagcccactgatctctacactgatcagatcagtgtatgttgtgtctgtttctgggataccacactttacaaggtgccatcaaaagactaataataaagtgaagatagcgtagtatgaatcatcatatgaagatgattgaggactggaaagtttaagggaaacaagttctaatagcagttttcaaatatttaaaaggatataatactgaagatttggaatagaaatcttaaactggaaagctctgagaggagtacagccaggataacaatattttaatatttgtgcttccaaaaagtaaataaatatattcatgtatggtattttttggaaaaaaacaatcacaaattgttaattttctcaagtgccttttttattttccaggcagtggggccttcatttcttgattatattaaatattgctccattggcttgttgatggttttaatcagaattttgattgaatatatttaacctatctagagaaatttcatttgctacagatgtcagttaattttgtctgttaaagtttgaaataattgaaacaaaattttttttattagaaacctcctttaactctagagacatttttctttaaaactatatttcttctggacaaattgtggaaatatttttagtcaactgtatggttttttttttgtttttattatcagaaggctggtaaattaaagatcataattttccattttgctttattatctgtttcatttgtaacttattttgcataccgctttgcctttgcagtaagaagtaaataaaggaaaaataagtatgaaacttactaggcttaaagagaattgaggtatataaacagtcgtgtatggctgtgtaaaaggcactaccacaaaatcctttgaaacatctttgtatctaacatgtaagaataacacaaaaggcttccaagtattttatctttatcaagagaatttgttttcaaatcttctgtgtaagagttaaggtgaccttggcatactttgtacttgggatgaatgtgtgtggttaatgtatgcagtgggtggtttgggtactttagaaaaaccaactcttctcaaatgttttttcttctttcatttatgcatttttttccttcctaattccatttctagttactcttacacataacagtattttttattagcagagggttactaattgtaaatgttttgcttcagtgcttcaggatggtcttgacatttactgatcatccactctgtgccagatgctacacttggcttctaacttttatgatctcatttaaaatatgaaaagagatatgatataaaggctaataatggtaactaaatatgttagtgttgtttttaaatttaactttatgctctaattttaggataattaaaacacagtttattttataccaagcaacttttcttgcaataaagaaaataagttaatttatctcaattgtatggaattagaaaaacatagacttatatgggatgtcacttggtacagtccctgaaaaacatattccatatgtaattcggtaaaagccctaattgcacaatgttatttgttagaaataatgaagaaaagattattttgtttttactttcatttgagaaataataaaatattgtagttttgaattaaaacttttgacattgttttgagaattttatactcgtagcaatctaagcagaacgtgtacgacaaaaagtctttgtattaaagtttctctgttttcctacacctaggatggtaagcggatgtttggcacctattttcgtgttggtttttatggaactaagtttggggatttggatgaacaagaatttgtttacaaggaacctgcaataaccaaactcgcagagatatctcacagattggaggtgaatactgtggtggttcaaaatgtcatccttaatttgtattttctatgatgaatagacattttagatccagatctaatcctttaataagccagatcctgccaaataatctactcctttagggtataaggattttggataggtacaataatattctcttgaatttttaaaatctttgatagcaacagtaaaatattattattaacttgattcttttgagggtctattttcacatgtattttagaaaccctgtatctttcagaattaccgtgatttgtagagaaatgtatatagtattatccatattttgtagaaaaagttataaggaattaataatcatggaattagaactagaaccccaagatacttctgacccaagtgcattctctttttggcttaactgattcccagtgaagtaatctttagaacttaaaagcttgaaattatgctttaaaaacacttcttagaatcctttaacctttatacagctacttaattttcaaaataaatgataactttaatgtttatgaaactaccctgtcttttctgctatagttgttctttccagtcttcctctgtccttgttactccaagtgtggtccatggacagaatctgcattgacatgacctgggggttttgtttgaaacgcagactctcagactccacttcagaccttccaagttcaaatccgtattgtaacaaatccccaggtgatttgtctagacagaagagtttaggctggtttttattctcagctgatgttaatttcttcagcattctgttcttattggtgacttcacagggctcaacttccacaaactggttttagttgtgacttcttgttttttcaaaagcctattaagtctcgggaaattttgagacagcatttttcaaacttactgagtcataaaagttatctttgaggtaggagtgtctattcttctttgaggattcagacttaatttttccttttgaatagctccatgttttgcccatctgccactcagggtcatatggaaaagtcactacattcttgacccaggtaccttttcaaaatctgaacttatacagagcttcaacaagttaatgtttttatttggaaattctggaacattacattaatcattcagaaaaaatgaatgcttgctcattgactcatgtctgtaagaagtcaggttacatcaaactctgaagttgctcagtcgtgtccgactctttgcgaccccatggactgtagcctatcaggctcctcagttcatggaattttccaggcaagagtactggggtgggttgccatttccttctccacgggatcttcccgaccccgggatcgaatccaggtctcccacattgcgggcagacactttaccgtctgagccaccagggaagtccaatatcctatacacatcaaatataatgaatttcttttgtctcttctttctgttccctttttgattttcttgaggatctcttgtggaatcctgtattttcattggtgaaaattattttttttaaattttgtgttatttaaagtgagtaaatgggaataatatcaaataaatatggagtgagaccctgttaatttgatagactaagtataaattctataaatgtaaataattattattttgtaatcattgacaccattttataagaacttactaaatgtcttcattttgttaaggagtttccctcagaggccttctgttttctactactgttaacttcatgtaaaagatttctttttctttattttagggattttatggagaaagatttggagaggatgtagttgaagtcatcaaagattctaatcctgtggacaagtgtaaattagatcctaacaaggtatgattgatagactgatgccccatagatacatctttgagactctgattttgttggaggaagactaaataataatttaacagtgaataaatgaaggactttttcatttctcaggcctatattcagattacctacgtggaaccatactttgacacatatgagatgaaggacagaatcacatattttgacaaaaattataatcttcgtcgtttcatgtactgtacacccttcactttagatggtcgtgcccatggggaacttcatgaacaattcaaacggaagaccattctgactacttctcatgcctttccttacattaagacaagagtcaatgtcactcacaaagaggaggtaagactccaaagagggaaacagaattagtggaacaaaaacactgaagccctgcaagaacaacgtggacatagcattgtgtatggtgacatactagaacttcttgacccatttttaagtcattaactttcagcttcttttctgagtctctcattcaccctagcttatgctttaaaaggttgattttttttttcctttaatgatccaaagtttcaggatatattattagataatactttatagttgccacttttttcttattttaattgattgtgtattcagttcagttcagtggctcagttgtgtccgactctttgcgatcccatgaatcgcagcacgccaggcctccctgtccatcaccatctcccggagttcactcagactcacatccatcaagtccgtgatgccatccagccatctcatcctgggtcatccccttcgcctcctgcccccaatccctcccagcatcaaagtcttttccaatgagtcaactcttcacatgaggtggccaaagtactggagcttcagctttagcatcattccctccaaagaaaacccagggctgatctccttcagaatggactggttggatctccttgcagtccaagggaccctcaagagtcttctccaacaccacagttcaaaagcatcaattcttcggcactcagccttcttcacagtccaactctcacatccatacatgaccagaggaaaaaccatagccttgactagacagaccttagttggcaaagtaatgtctctggttttgaatatactatctaggttggtcataacttttcttccaaggagtaagcgtcttttaatttcatggctgcagtcaccatctgcagtgattttggagccccaaaaaataaagtctgacactgtttctactgtttccccatctatttcccatgaagtgatgggaccagatgccatgatcttcgttttctgaatgttgagctttaagccaactttttcactctcctctttcactttcatcaagaggctttttagcttctcttcactttctgccataagggtggtgtcatctgcatatctgaggtgattgatatttctcctggcaatcttgattccagcttgtgtttcttccagcccagcgtttctcatggtgtactctgcatagaagttaaataaccagggtgacaatatacagccttgacgtactccttttcctatttggaaccagtctgttattccatgtccagttctaactgttgcttcctgacctgattagatttctcaagaggcaggttaggtggtctggcattcccatctctttcagaattttccacagtttactgtgatccacacagtcaaaggctttggcataaagcttactaaatatttttcaatcaatccactggcctaattagatgttatttcacccagatcatcttaacaccaattgaagttgctattgaagacatgcagaaaaaaactcaggagttggcatttgcaacacatcaagatccagcagaccccaaaatgcttcagatggttctccaggggtctgtaggcacaacagtgaatcaggtgggagtgtttgccaatactgtgtgattttagttataaatggaatttggaatgattacagtattatatttttcagaaatcacaaatgtgttacatcaagtgaaaatatgttagaagtagttgcacagacactgaaaatataagaggttaaactaaaataaagattttaaggcctttacctcctaaaagtatatgtgatttggagtttttacttccaaatgatataacttactcacaaaagattacctttaattccaaatatcctgctaatattctgaatgcttgggggaaactgttttcacaaaataaagtatctaataatcagtggactgacagctgattgtccgtagcctgataactgttatatctaaggtaaagaatataaaaaatacaaggcaaaaggcattaacaaatacaatagttagtgctttgtctcctcattttctttgaaatatgaaataataagttaattgctgtgggcaaaagtatagatttggcatcagggaaaactataaacatattgtcagaattggtctctgaaaagttttaatataggcatagtcatatatatattaagcttaaatgcagcccatcttggtgctaggaaaaatggatttggtaaattctatttctgtgaatatttaaaaaacaaaaacgtactttttgttttattttcttattttacaggggcctttggaagttgcccaggttttcctatctgaaatacctagtgacccaaagctcttcagacatcataataaactgcgactttgcttcaaagattttactaaaaggtattcaaagttttctacataaagatactcaaattgagaacatctgatccacagtttgatatgagtcttaagggattattgaaaggagaaactatagaaaaatggttcacaatgagacgtagtctgaggataacttactactccatatgtattttatatatatatatatatatatatatatatatatatatatacacacacacacacatatatatccctgccccccaattctctatgtaataccatgttttaaattttgaaaatgagagaaacctcgattcaggaaatctttaacttgaaactattattagtttgacatttaactagttaactttgaaagctgttatttatttttaacatttcaatgtgagagtttctgtctctcttccctcagaaaacatacaagcagcaatcttggaagcaaaaaatttttcttcagatcttacccttatatgtctcttttccaagccacttaatctttatgatcctctgtttttaatgtatgaaataaggatataatatctacctcacacagggagattgtgcaaattagatgaaataatacttggatgaattggggcctctcaaaacacccccagatgggatgatttgctaggagggctcagtggacagcatgtagtcatatacttggctatggtttgttaacaatgaaagagtagaaagtaaaattagcaaagggaaggggcatggggtgaagtctggaggaaaccaggtataggcttccatgggtcctttccgaggttggtcacatagagatgctgattgttcagcaaagaattgtggcagcctgtgggaaatcatgtccacccaggagctcagtagagactcaggtgccaaccaggctttttgttgagggctagtccaaaatcactgcagatggtgattgcagccatgaaattaaaagatgcttattccttggaaggaaagttatgaccaacctagatagcatattcaaaagcagagacattaatttgccaacaaaggtctgtctagtcaaggctatggtttttccagtggtcatgtatggatgtgagagttggactgtgaagaaagctgagcaccgaagaattgatgcttttgaactgtggtgttggagaagactcttgagagtcccttgccctgcaaggagatccaaccagtccatcctaaaggaaatcagtcctgggtgttcattggaaggactgatgttgaagctgaaactccagtgaggctttggccacctcatgtgaagagttgactcactggaaaagaccatgatgctgggagggattgggggcaggaggagaaggggacgacagaggatgagatggctggatggcatcaccgactcaatagacatgagtttgggtaaactccaggagttggtgatggacagggaagcctggcgtgctgcgattcatggggtcgcaaagagtcagacacgactgagtgactgagcgactgaactgaactgaactgagtcatgtaggtaccttctccctgacagttaccaaaataccagactcccaaaaggaaagctggtatttaacagaaactatagtgtttttataaaatgttcaggcacagtgagtcactctttctgcatatggtaggaacccttcccaaattcagattcccagactgtaacccagggccaaccttacaaacaggccttcttaggatagcaacctcaggcttgccgttacctcttttctttacaaataacatttggtacataataaataggtcttcagtaactgcaaaattttgaaacaataggggaaaagaatcaacagcttgatactgattgctgcttcactcacactatgagcacaaaagagggaatgatcgttttacatggtgatgtcagggaatatttcacataggaattaacatcataaacaaaagtacagagtacaaagtattaaatgggttgctgttgtatctaactcttcgcgaccccaaggactgtagcctgatgggctcctctatccatgcaattctccaggcaagaatactggagtggattgccatgcccttctcctaacatcatatatggaccttgaaaattagagataccaaggaagcatttaatgcagagatgggcagagtaaaggacagaaacagtatggacctaacagaagcagaaatattaagaagaggtggcaagaatgcacagaacaatacaaaaaaagatctcaatgactgggataaccacaatggtgtgatcactcacctagaaccagacatcttggagtgtgaagtcaagtgggtcttaggaagcatcactatgaacaaagctagtggaggtgatggaattccacttgagctattttgaatcctaagatgacactgtgaaagtgctgcactcaatatgccagcaaatttggaaaattcagagtgcccacagaactgggaaaggtcagttttcattccagtctcacagaagggcaatgccaaaaaatgttcaaactaccataccattgtctttttttcgcatggtggtaaggtaatgctcaaaatcctccaagctaggcttcaacagtacatgaaccaagaacttccagatgttcaagctggatttagaaaaggcagagaaaccagagatcaaattgccaacatccgttggatcatagaaaaagcaagagattccagaaaaacatctacttctgcttcatttactacactgaagcctttgactgtgaggatcacaaactgtagaaaattcttaaagagatgggaatactagactgccttacctgcctcctaagaaacctgtatgcaggtcaagacaacagttagaactgaacatggaacaacaggctggttccaaattgggaaaggagtatgtaaaggctgtgtattgtcaccattcttatttaacttttatgcagagttcagttcagttcagtcgctcagtcatgtcagactctctgcgaccccatgaaccgcagcacgccaggcctccctgtccatcaccaactcccagagttcactcagactcacgtccatcgagtcagtgatgccatccagccatcttatcctcggttgtccccttctcctcctgcccccaatccctcccagcatcagttttttccaatgagtcaactcttcgcatgaggtggccaaagtattggagtttcacctttagcatcattccttccaaagaaatcccagggctgatctccttcagaatggactggttggatctccttgcagtccaagggactctcaagagtcttctccaacaccacagttcaaaagcattaattcttcagtgctcagccttcttcacagtccaactctcacatccatacatgaccacaggaaaaaccatagccttgactagacggaccttagccggcaaagtaatgtctctgcttttgaatatgctgtctcggttggtcatgctgggctggatgaatcacagtctggaatcaagattgctgagagaaatatcaataacctcagatatgcagatgacaccactcttatggcaggaagtgaagaggaactaaagagcctcttgatgacagtgaaagaggagagtgaaaaagctgacttaaaactcaacattcaaaacacaaagatcatggtatccattcccatcacttcatggcaaatgggtgggaaaacaatgaaaatactgacatacttgattttcttgggctccaaaatcactgtggatgatgactgcagccatgaaattaaaagatgcttgctccttagaagaatatgaccaacctagacagcctattaaaaagcagagacattactttgccaacaaatgtccatatagtcaaagctgtggtttttccagtagtcatgtatggatgtgggagttggaccataaagaaggctgagtgccaaaaaattgatgcctttgaatggtggtattggggaagactctggagagtcccttagactgcaaggagatcaaaccagtccaccctaaaggacatcaacccggattattcattggaaggactgatgctgaagattgcatagtttgaccacttaatgcaaagaaccaactcattggaaaagaccctgatgctgggaaggatagaaggcaggaggagatgggggcggcagaggatgagatggttggatggcatcaccaactcaatggacatgagtttgagcaagctccgggagatggtgaaggagagggaagcctggcgtgctgcagtccatggggtcgcaaagagtcagacacaactgagcaactgaacagcaaaaacaatggaccttgaaaaatgaatattagtttttcagtcagaaaagaggggagggatatactaaaaacaaaaaactcagcatgagcaaagtttagaatctgttctaagaaagatgaatagtgaagctggaactgtagtctctgaagacaagtagtcaaacattggtggaaatagactaagtaccattaagtagatgactttttaactaacaaagcagcatcagaactataggcagaagccagtctttcacttcctattctggtttctcttatcatattatgaactgtggtttctcttatcaaatcattcactgaaagggtttatttgggtagcagtaatttcatattacagcacctttgtcatcaggaaagtatgaggaatgctaacttgttcaagtctctcaagacagtattttattctcactgcaatagctgtcattaattgttatcagtttctcctgcatgaacatggtaaacatctttttaaaaacttcagatagcttcactggaagtctggggttttatgatctgattattgaggtagatgactttatgggtttggttatagaaaacatggttcctaatgtatgttgaagatgaacgaccagagtaaagaacacaagcttcttcttgactgacttctgttgtgattgacatatacacactcttatatataaaatatctttccttgtagcttagtcggtaaagaatctgcctgcagtgcaggagacctgagttcgatccctgtgtcgggaagatcccctggagaaggaaatggcaacccactccagtattcttgcctggagaatcccatggacagaggagcctggcaggctacaggccatggggtcgcaagagtcagacacaacttagtgactaaactaccaccaccaccaaggacctaatgtatagcacagaagctactcagtactctgtaatgacctatatgggaagagaatctaaaagagtgggtatatgtatatttacaactgattcactttgctgtacacctgaaactaacacaacattgtaaatcaagtatactctgacaaaaatttttaaaacattgattttattatttgggatgtttcaaatacgaaccaaaaaaaccctactgtgattgtgagctggatgatcttggaacaatacatacttctttaggtcatagacactaataatgcttattttctttttatttttggggggattttttactgttactacaattctaaaacagatgtcctcttctttgtgtttatttacgataaggtaatgaattcctatagtttgcaggtctccttaagggttaatgtaaagaaggttttctcttttaaattacaaaaaggcagaaagccaaactacatggtttaaacctttcaagtcatagtgaatacttttttttatttttgtgtgtatatattttgtgttaatatgcgtatttgttctaccacagctgttatatatataatcttaaattcttattttttcaattaagcttaaaactattattctaatagttgtattattaaatatctgaatttaagttgaatttaagtgtggtatagtaatgaagtgtattttttttcttttgccaaattaaagtattaagctcaagattactgagccaaagtacaatgagcatttttgttggctcctaatatgtaatctgttccaaaaagtctaagtagtaacaatgccaagaatgcaaatgtactactagttgcagtacaccttactttatgtaatgctatttaaatacggtgtctcttgttaatcaatttaaatggtacttcagtttgcattattttattcctaaaaacaataaacatttttttttttgtatttactctttacatactcttaggtatataaaccctagaaatatctcttgtacatccagaagtagttaaagaaatagttgaatagtattctttatagctaaaaaacgacaacaaaacacaaaaccaggagacaaccaagatatccatcaacagaggagtaaataaatcatggcatatccataggttcaacttcaaccagataataccacatctttttccaaagtgcgtaagccagatttaaattctcaccagtaatgtttgggagagttcctattgcagtgtcacctccccagtatttgatattatctgacaacctaatttttgccaatctagtgggtatgaaatagtatgtaattatagtttaaatttgcttttccttgattaccagccaggttgaacatcttgtcatgtgtttattagctatttctctttcctctctgtaacgttcaaagttctgtttcttatttgccattttcctattgaattcttttccttactgatttctaagggtgtttacatactggaaaagtaatcctttatcatttgtatcacagacatcttttctgaacttggggcttagcactttttaataaacagaagttgttaaatttaatatagcaaaataattcagtctttcttgttaggaccgttgctttttgtgtcttaagaaattttttacccaaggtcagagtatgttgacttcctaaacatctatatagtaatatctctcaaattgagtatagcccaaacaaaaggggaagatggcaaaaaaggcctttttacttttaaaaacaattctttccattgatttttgtatatggttcaaggtgggggtcagtttgatttttgcccatactgataactgaatatgacgtgagatagcagtcagatttctgttcccatatggttgtgcagttgacctggcaccacttatttcaaagattaccctttctccactgctttgcactgttaatacatcaagtgctcactttgtgtgcatcagtttctagggtttttttcttccattgttttatttatctctctttgactaatatgctgtcttaattactgcagctttataataaacttttatgtatgataggccaattcctctcacattttgttcaaggaaagagaattaactcttccggtctatgaatatggtacatttctccatttacttatatcctctaaatgtttttctaaaatttttctgtagagactttatcttttcacttattctttggtgtttgatatttttatacttttgttaatggtatttttaaaaattacattttgggggacttccctggaggcccagtagtaaagaatctgccttgcaaagcaggggcatgggtttgatccctggtctgggaaaattccagttgctgccgggcaacctagcccatgtgccacaattaagacccaacacagccaaataaatattaaaaaaaaaaaaattattttctatttgctggtttacagaaatacaatttatttttacatgctttacatgagtattgccaaattcacttgttaattctaataatttatatgtagaacctttttcttactgtactgtttagaatctctaataaactatgctgaataggaataatgatagagggcatcattttcttatttctgatctaaaagaaattttttcatcattgagtataatattttcttcatgtattttgtagatatttttaattaggtgaaataagttcccaccagtttgtagttatgctacaagtttgtcatgacaatattttaaaatttaatcaagtgagttgtgtgtagggagtaggaatgtaatatagtgttaggacagtttattattattttgtttgggagttttgcaactgttttcatggatgggattgaattacaagttgtttcttatagcccccattaagttttgatatcccaaccttgaaaagtgagtttgaaactcttctcaggaatagttctttattcctcctatactctagaatagtttttttatatattcagaattgtcgtgctacaatgggattatctatccttagactgttaagtagaatttgcctgtttgtgttttctctgtgggtaaatttgtgatttgactgatttgatgtatttaatggtttttggattattcatatttttacttgagtgttttggtaaatctaatttcagatttatttacattaatttcagatttatttacattaaattgtacctaatatcctctgtgcctttataaacttctgctgtatttgatgtctcattttgcatttctagaagaggatacctggccttctctcgtttattcttgccagagtttagtctattttattagatttttcaaacaaccaacttctgcaattttttaaatacagagttatcatactttaaaattttattttcttccttaggagtttattcttttcaaattgctggttagctcttcagttttagccttctttccttagtataagcatttaaggctatacattttcctctaagtatcactttagctgcattctgcaaacactgatacatatacttttttaaacatactttttccatttatctgttggagtccagatagtttttcttaaatatctgaattgaataagcaatctcaatctattcaatttttgtttgttttattaagtcatggcctactcttttgtgaccccatggactatatagcatgcctggctcctgtgtaccttggatttcccagtcaagaatattgtagtgagttgccatttccttctccagggaatcttcccgacccaggtgttgaactcacatctcctgcattggcaggcggattctttaccactgaaccaccaaggaagtccatctattaatttaagaaacttctgtttgaatacaggcaaaccactctgccagatgccattgaataaatgagtatggttatataccgtaaagaacttatagtctagtggtgatatgtgtgtgtggggggaagggggtgtcagatttaatattaaaaaatacataattaattttcaattgtgaaaattggaagtggaagttagattttaaagaaactctgttgagcctcgcttccctaccttaaacctaattgcaggagaggatgtttaacatacaacagaaaaactgaatgccctcatcatggtggctacatatatatatatatatatatatacatatatatacatatatatatcagtaagccttcgaaactatgtcaaaagaaatcttttgatgacccactgttttccctaggtgtgaagatgccttaaggaaaaataagagcttaattgggccagatcaaaaggagtatcaaagggaactggagagaaattatcatcgccttaaagaggccctacagcctctgataaaccgaaagatccctcagttatacaaggcagtattacctgttacctgccacaggtatgcattttttttctattattttgtatctttagaaaaatgaaatccacttgaattatttaatactgaatttgtttaccttgtattaaatggcttcatatatgatgtcttctgaaacctaacaagttcaacttttgcaagccttctaccagctatacctgaagcagcctaccagatagaaagtctgataaagagaataataaagtcaagttctcatactaaccaggacaccacacataagttttatctcctaaaactgtttcttttaatgtcctgtcaaagtttctggtatttctgttgagagaatttgctagaatatactgaagccaggtattcatttccattatccctgacagtaaatagtatatgtctttctagatttggatcaaaacagctaactgcactgagtatcaagaaaacatcactattttcctttattttctcagtgtgacaaaattagaagtggaaataacttggaattttctacaactgatcctaatctgagtagataattttagactcctcctctgtaaaataatacttgccttgaagaggttgttgtggaaattaaatggcatgtaaagttccaaagacagctcttaatatttttacttttaacccctgaattctggacagggcatgataactgctaaaagtaaactgcattctttgcatttttaaatcaaaatgtacatacatctcttgaattattgtggcaccaatattttaccacctcctttttaaaaaattataagtgaagctgtttaattatatttacttgatcaaatatttagaaggcatttgaagttgcttatattaacaagcatgtatactattgatacataagaaaattaagctggctatttgattatctggtaatattacctgttcttcagtgataggatgtttgtatacttctaagcctctgaaaatgtataccaaatgcatgtggtatgtcatgtcccctgcagggaacatgtagacagaccatgtacaggaacaggagaccaaaaggcctgttttagaaaattccatggatggaggagcctggtgggctacagtccatggagtcgcagagtcggacatgactgagcgacttcactttactttattcttacaatgatgcaagacaccccaggtggtttcctcttgaaacttgttgagaagcaacactagtcccctcacttttggcttcctctgtcgtctttttggaatgtctgactacttcttgcctctatctaccttcaccagtcttatattcattggtcaaaggtcctgggttagagtgctgggtccctgaaatagtgaggtgtcctaatgctagtctctcttccatcaaatttctcaaactccttttagtggaaagactgtattgtttctgtctgaaggaagcttcccttataccagtatcctgaattgtgccttcttctatgatggttattcctccaagctttagtttttagtatttgcaggcagttttttggattttagaaaatactttttcttgataaactatcttccaagactgctattttctcaaaaaaaaaacaaaacaaaaaaacccccaccaaaaccaagtttagagattcaaagctgaatacaatctctttgtatctgtcctctcctttcctagagattgtaaatcttaagacattaacattaatgtcaggaaagataagcaaaattatcttctaaatttactttaaaaattttttaattattttcaaatatttaaatttaaaaattatttaaaaagtaatttttaaatttaaaaattattttaaaaataattttctaaatgtaaactcttctaaaatttattgtaaattttaatagagaatcctatttatagtaatgtataatggtttctttcaagaaataatttaaaataatcttagttttaatttctattattataaatatcaataaataatccacataaacaaaagcttccttggggtcctcaattttaagagtgtataaaggacctaaatgcccaaaacttgagaaccactgatttaaggcttagagtttactattttaaataaaatacctgtgttttgccttttaacctcaagtaaatctcctgaaatctctcccattaccccttagtacctgtttaatcagatatctaatacatttattggacaaatgaataaatgatcaatggtcctggacagtgtcacttcaaatctatcgagaagtctacaagttagaatacatagagcaatagtgtgtgggatgagcatgtaactagaaagtgaagagctttgcttgcaaaagttttaaagttaataagcttttgctggcaaaactttgagatatctggccgaaagcatgtgaacattttagacgattatataaaaatggtttactcatattctttcattttctctccagagattccttcagtcgaatgagtctgcgcaaaatggatctctaatttaaatgcacttgttttattcatttgaaaaaagccatgtattcaacactgaatgtgaaaagaatttaagagctattgaaaaagacttgggacttaattctggaaattatagcattaatttactcatggaagaatgcagtggccaaaataatatcaaatggcaattgttgaagtttgagaatcatggctgtggtttctaatgttccggtaatatgctgtccttttttaaaaagacattttaatgactcaaaggtacacttacatttaccattatttataccatagctaacgttaaatttatttactttaagtttgtattttttaatttatattaccatttatagatttgtttggaaccattttaaatgtagtaatgcttattttaaaggtactattaaatatgtgaacgtttacactaattaaaagacttaaaaatttttttattgataaaagcagagagtgagttagagttgattaaagaaatagttgcaaaaatagca

SEQ ID NO: 163 - DNA, 54172 bp, Hippotragus leucophaeus
  source 1..54172: mol_type = genomic DNA
tgcacacacaccacccacccactcccagctctctacacctggaaaaggacagtcaaaaggagaatgcaatgcaaatataggagatttcctatttccatgaagttttcagccggttccccagcatctactgtaccggaaagcgagagccatttagggcatagtactagcctcagtcttgtttccttcctttcctttgctattaaaatcttttgctctgatttcaataaggcactcccctttgtgcaggagtccaggttctgcagaagctgtctcactctagagacacttttgtaggaaggaggaacatgtttaaaccagggagagcgtgagaactctgggtgagactggggcagagctataccgggtgtgtgtgctggggggtggggtggggagtagcctccacagtcttgaggtttcggagttcggccctggcgcagactacaagtcccagaagccctcgcagtgacccggtgcgccgccgaaccttcccctcactcttccagacagttgagataaaggttccgttcagggctcgctgcgggttggtttgttttgaacggcggtgacggaggctgggagcccggccgactgcaggcgggggcgtcaggaggcggattcctgccgtcttaagcacgggggcgcgggaggaggggagccgggcctgaggaccggggaccgagcggcggagacagaacaggctgaggcgatggagggcgacggggtgccgtggggcagcgagccggagtcgggtcccggcccgggaggcggcggagtgatccgcgagctgtgccggggctttggtcgctaccgccgctacctggggcggctgcggcagaacctgcgcgacacgcagaagttcttccgcgacctcaggggctcgcagccccgcggctgtccctcctcccctgtggagggcggcgaggccgggcgcggccctgccggcgacgtcgccgcgaccgggctgccggcgggtaaggagggcaagcggtgacggagacggggccggagaggcgagcccggggggcgggccgcgccccggccccagagaaacaggcccggggaggggcggaaagtgggaggagggcggcatggccgggccggggccctgcagaccggctccctgaggtgccgggggagggcgtctcgggtgggggagggggcgccggggaccggccggcggggccgcgggcgaggggcgcccgaggcgggggtttcaggagccggctcggagggaccggcggcgggggcgggagccggggcccccgtttggaggctgcagaggtggcgcctaggaaagttactctaagttcggaggtgagcagttgtgcttagagtcccagttcagggatggtggagtcggggggtgggtgcaggatgggcggtaggcagggaccctcaggaggccaggggactgtagtggaggttgtgtgtgtccgctgtgtgtgcgtgcgtgcatgcttgattttgtgtgtgaaatatacatcaatcatgaggcaactctgaagaagtaaggaatataactaaatagggctggaatcgctaaaggaaagggtatcttatgtctgccacggtatttccagagatggcggcttgcgcttatggtaaagttagacaggggaagaatctctctctctccttgttttttttgtcttgaaacttgacttgattctctctggcatgtgttagagaccttaaagcacttaaaatcgtgcagcgtctttgatcttgcctagtttcttgcttcctcttaaactgctgttggtgggaacaggagggtttgttaaccacttggtctaattaggaaataacaggttggatgggagaaaggacaggcgtcccatgtagataccttgggataacacagcaaagagtcagggggtttcattcagtgattctccaacgaaaatgtgtcctaaaactaaagtataaaacatctatcccacagattgattgaataggtctagtgggtgggtcctaagaatctaaatgcaagccatcccaaagggatcctggtgcaggtgggccacaaacactttcagaaacactgacttagaggctgacagcaaatttgagcatcaggtgtagaatgtgttgaattgttaaactcttcagagtttctgtgtcaggccctgcgtttccagagttgcacgtttaacgtcctaaatttgtctgagactccaaaaatggtgataaaaataagattctgattaatggtatttcacttaattggcctcagttcggttcagtcgctcagtcgtgtcagactctttgcgaccccatgaattgcagcatgccaggcctccctgtccatcaccaacccccggagttcactcagactcatgtccaatcgagtcagtgatgccatccagccatcttgtcctctgttgtccccttctcctcctgcccccaaatccctcccagcatcagagtcttttccagtgagtcaactcttcgcatgaggtggccagagtactggagtttcagctttagcatcgttccttccaaagaaatcccagggctgatctccttcagaatggactgagggactctcaagagtcttctccagcaccacagttcaaatgcatcaattcttcggcactcagccttcttcacagtccaactctcacatccatacatgaccacaggaaaaaccatagccttcactagacggaccttagtcggcaaagtaatgtctctgcttttgaatatgctatctaggttggcctggatgtaaataaaaacttatatttatctgataggatacgtgggaggagagggatgactagcttttctgaagttgtggttttgacatctgcccagagatttgctgttgtaaaatggacccatggaggggattgatttctgtgaagcgatttaaaaactggtttgtgtgagaaggggggatgttttcagagatgagccccagaatgtgtactttcaccctcttcctcagcagtgctttccagcagctttccctgctcagtttttcttttatcttaaaaaaccctgtgttagctgtaattttacagcaactgtttattgtagaattactattgaaaaaaaagagtagattcacctgagagagatggaggtttttgaggcacattggttggctcctgtttttattctttaaaggccaacttaagaaatgcaaatgcacctttgtattttgcctcattggcttttctagttgactgctcaagaactcatctttgcgcatttaactctttacaccctctggaatctgttcatccaaagtaaagagtaggggcgggtacagatgacaggactgggagccttttggttttgttccataaagtgcttccattagttcagagtggagagttttatctttggaggtgaaaaggagaaattagacaagtggcacctactatgtatattttgggggatctaattttcccagctgttaaaatgattgtgttagaaagtagaaacgcctccttaaaggacagctagttcttgttctctccctttacagaccatctctttacaaggtcaagttcgttcaaagattcttaactttctttggtgaatattggtttctgattaataggaacttgaaatgtccaggaaaggaacactccttgcttaacctcatattcttctgaaggttttaatcattgtttctgaatggaagtgtcttcttggttggaatatagtatggcatttgagcaattgaagatcagagactaactaaattttcattatttcacttttaaccacaaaagagatggggagaaccccccaaataatgcttccttcttaattttgacagtttttaattcactggggcagtgtaaagagtatataatgtatatgtacttgatgttttagaagttaaaaagcaggtggaataaaactctgaaatcagagttgcttagcctgtacaggaaaaactgaattataaattgctttgattcagttcctccttaaaaaaaaaaaaagctttttttaaaatttatttttgactgcactgggtcttcattgtgatgcccggacttctcgttgtggcggcttcttatgttgtggcgcactggctctagggcactcagacgtcagtggttgcagcacatgggctcagttgtggtgcacgggcttagttgtcccatggcatgtggagtcttccacaccaggaatcgaaccctagcattggcaggtggattcttaaccactggaccaacaggtagtcccagctcctcttttcttcccaaatcattggccgccttttcacttaactgtgggggctgaaagcctgtctgttgatttacctctgtcacagggggttcagaggtagtgaaataaaggctttgagcacttctgaaggtaggcagagtggagtattacaaagtagtagagggagaagtatttttcttattttctggtccagtagagttccaagctgttgcagtgtatcataaacctctggattttaagaagttgcaatgactcaaatatatatttagttggaatgttctggtctgtgctatatcctttcctcctggttctggtccttactgagtgaccttactgtgatttgccagtttcctcatctgaacatggggattgtagtaatagtagttgcctctggggttgttgggagttaatatatgtgcttagaacagtgcctggtaaggtgctctgtaagtattagctattaaagatgggcataataagggagagaaatggtatgaacctaacagaagcagaagatactaagaagaggtggcaaggatacacagaactattcaaaaaagatcttcatgacccagataaccatgatggtgtgatcactcacctagagccagacatcctggagtgcaaagtcaaatgggccttaggaagcatcactacgaacaaagctagtggaagtgatagaattccagttgagctgtttcaaatccttaaagatgatgctgtgaaagtgcttcactcaatatgccagcaaatttggaaaactcagcagtggccacaggactggaaaaggtcagttttcattccaatcccaaagaaaggcagtgccaaagaatgttcaaaccaccgcacaattatactcatctcacacactagcaaagtaatgcttaaaatcctccaagccaggcttcaacagtatgtaaactgtgaacttccagatgtttaagctggatttagaaaaggcagaggaaccagagatcaaattgccaatattctttggatcatagaaaaagcaaaagagttccagaaaaatatctgctttattggttacgccaaaaccttcaactctgcagttcacaacaaactgtggaaaattgttaaagagaggggtatacctgcctcctaagaaatctatatgcaggtcaagaagcaacagttagaactggacatgaaacaccagactagttccaaattgggaaataagtatgtccaggctgtatattgttcccctgcttatttaacttgtatgcagagtacatcatgagaaacactgggctggaggaagcacaagctggaatcaagattgccgggagaaatattaataacctcagatacgcagatgacaccacccttatggcagaaagtgaagagaaactcaaaagcctcttgatgaaagtgaaagaggagagtgaaaaaactggcctaaaactcaacattcagaaaactaagatcatggcatccggtcccatcactccatggaaaatagatggggaaacaatagaaacagtgacagactttattttcttgtgctccaaaatcactgcagatggtgactgcagccaggaaattaaaagacacttgctccttggaagaaaagcaatgaccaacctagagagcatattcaaaagcagagacattactttgccaacaaaggtccatctagtcaaagctatggtttttccggtagtaatgtacagacatgaaagttggaccataaaggcttagcaccaaagaattgatgcttttgaattatggtgctggagaagactcttgagagtcccttggactgcaaggagatccaaccagtcagtcctaaaggaaatcaggcctgactgttcattgaaaggactgatgctgaagctgaaactccagtactttggccacctgatacgaagaactgactcattggaaaagaccctgatgctgggaaagattgaaggcaggaggagaaagggatgacagaggatgagatggttggatggcatcagtgactcaatggacatgagtttgagcaagctccaggagttggtgctagacagggaaacctggcgtggtgcaatccatgggatcacagagtcagatacgactgagcaactgaagtgaactgattgttagtcaataaacatttgagtgttagcatgggggataaagagtcaaataaaaacattggccttggccttggattagtggagatcagtcttcccattctatagttttctgttaagaaggataaaaattataattatcaatactgtccacctgtttgtttatgttgaatgaggacagaaaggatgaagaaaatctgaacttgtccctctagaaaggtataatcttatctcaagcatatacatgtgcaacatataaagtagaaaaatagcagaaagctaaagttggattataagccttttaagtgagttacaattcttaggctgttacagctttttgcctttggttcgttctctttgttcctccaacatccttcaccctcctttgttcacatctggtgtaaactggctgccagaattgaaagagaaaagtctggtgtacctattgctttaagaaaagaagttgcctctagtaatttgtattgatctatttggaagagctgcctcagcatttcaacataagcttagcagaggtggtgctgtaaatgtgattcttagttatgttacttttattaccttaaatgaacaaaaccccatttccccaagtatatctaaaactttcactttctttgttttcttctggcatggaggcaataaatagtagtcaaaagtttcaaccactgttgctttttggtttaacaaatgggtggggggtggggggggtgggggggtgggggggtgtggggagtagtcagtttggacttccctggtggtccagtggttgggtttcctttatttcattgcagggggtaggggttagatccctggttgggaactaagatcacatatgccatggggcagcaccaaaaaaaaaaagtagtcaaaagcaagcacaggcatttgaattagatctgagttcctcttctagttcagcctttcattaactgtgggacttagggcaaattacttaagctattacgggcttccctggtgtctcagacggtaaagaatctgtctgaaatgtggaggacctgggttcctgggtcggggagatcccctggagaagaaaatggcaacccactccagtatccttgcctagagaatccccatggtcagaggagcctggtgggcgctacagtctatgaggtcgaaaagagtgggatgtgactgagtgactaagcatagcacttaacctgttggattctttgtatgtcaaatgggagtgatacagaatgccacagctatttgaaacatccagaacaagaaaatttgtaaagacagaaagtagattaatgattttgccaggggatgaggagtaactgctaatgggtatgggattacttcctagggaataaaaatgttttggaattagagagtggtcatgattgtacaactttgtgaatgtgctagaaaccacttaattgtatggtttaacagggtgaattttatggtatgtaaattttatctaaatagaatgggaatgataatgtctgcctcacaaagttgtgacatttagagatcatataaagcacatagcacaggcatatacttagtactaaacacatgggatgtttgagtgtgtgtgtgtgtgtatgtatgtacttggtgaacattagattaggaggttgacacatggggattgaggaagaataagaggaacagaaggatggaatgagggacagaacaattttgagctgaagccacatttaggcccaggtctctaagctcccagttcatttctgcaactcttcccttgttctttcctgctctgcccatgaaactgtaaaatgcacccttgcattggagagattttgttacaagtgagtcataacccaggctctgtagcttgccatgaaacagtattttacatcagtgggagattttatctgagtgagtgagtatagtgtgacattacctactcaagcttcttattccagtttccagtcccttcttttccccttcctaatcttcctttgctaggataatctattttccatggaatggcgtagcccaccactaaaaaggcttggataattctgcctgctcttgaaagaaaagacattattacctttaagatggttatcatttgcaacatgcttagtttagtcttaaaagtaatttctgatttcagtatggttagttcttcggccttatgagtagcatttaaagaaagcatggatttaaaataaaaatcagttctggtttttaaattttattttgctctgtccactttccagcatcagcatttatttctccgtgcctctctgtcttactaggttaaggcaacaaagaaccttcctgcaataaatgcacttctcaaaagcaatctttggaaaataaagcctcaaaaaaaaacgtattgaagtaaatttcagcttaaacctattgctcagttcctataggctgtagacatatagatcatgcttgtatttatttatttgtataactatgaatatatttgtcttatttcacttgctagatcatgaattcttaatggtaaagatgtgttttattcatctttgtatccctgcagtgcctaccatagtacataacagacaaattagtatctgttaaatcgtttccatgtctggtagatgattggaatgatgtgtttttccatttcagaaggatatttttcctccatgaaagatatacaattttatatatttgcccacattttcctgtctgtgtccctaaaaaagagcaataataagcatttgatagatgactagttaggctagagctgccagtatcccaaagaatgagtttcacgtcccaaataattagttgcatccaatatcagagcttcatcatgatataggaaataaatccttaatattcattcactcagtaaatctttattaatgcctaactctactgggttcaggacactcaatagtgaagcactgtccaattaattgatatttttatttttaagttgaagtttatgaaagaaagaagggttagcgtttcattgtgtaccctctgaagtatttcttacacattggggtttcccgcttaaccattagtctttgagggcataaggataacgcatatgagaagttctaaggttaaatggtattgacaaaaagaggagttgagatgcttcactaactttctgacagtacaggagaattagccccagtgtatctttgatgggataactataattgtcttattggcatggttcaaaagaagaatgcattcatgaaggtcgtggttagagtgtctttcatcttcatcagagcttactcgcaggggagccagtgtgaagagtgtgaggtgtgtgggtggatgtggttttttctctctcagttttaagatctgaggtgaacttgctgtttacttcttgtaggaagtaaaagtcacctccagggatggtccagggagtttgaaaggcatcattcatattaataaccagagtgtacagtccttgtgaaggatacagcttttcttccatcactctcagatgcctggagtctcctgtaggatttttagtctaatcgtaggccactccatgcttgaaaattgactgcattctttgccaaatggggactctggtaattttagggatcctggaacttgatactttaacaggacagatgtagcggtgattgagatatgtgctcccttgtttaaatcagcctctctgagaaagtcttctcctaatattcctccaaaagattgaaggcaggaggaaaaggggacgacagagaatgagatgtttggatgtcatcaccaactcgacagacatgagtttgagaaatctccaggagttgatgatggacagggaaacctggtgtgctgcagtccatggggtcgcaaagagctggacacgactgagccactggactgcactgaatattcctccaaaggccacacgaaaattccatgaaggaaagttggtcaaagcatggggactccgaattccccgtgggcccctggttgaattgcgcgtgatgtgcggtaccttcttctgtggtgtttagtaggcaatgtgagtggtttggatgtatccccagcctgggggtgccatgtggctgtgggaaccttttgaccacaagcctttgaagttgggctttataatgtatttctgttccctggggtggtgttctctgggcaggaagatgggaagtagaacttgagggattgttttgcttttcacttgttttatataaggcatcaaaactagctcaaagaataatgaagcttatgtattcataaaagcctttgattgttaaaaaaaaaaaaaactcttaaagaatgcttttattacttttattttactcaaatataaaaagaggtctaattttagcttcatcaagattaaaacttgagtgtgttatttatgccagacagtttttaccctttctgggtcatataatggaagagaattacatttcccaggattgttttggtgaagccaaattttccaaactagagagacttaagtaagaccatatcataaaagcaactaggtaatgagactaatttgagtaaaagctttgtgtttattcaaattagaggaagagtaactgaaccaatatggagtttactttttagaaaaattctatatgatatactctaccaataacttttaatgggggcttcccttgtggctcaaaatggtagagaatttgtctgcaatgcaagagacccgggtttgatccttgggttggagagatcctctggagaagagaatgactaccctctgcagtattctcgcctggagaattccatgaacagaggagcctggtgagctacagtccatggggttgcagagtcagacacgactgagcgactaacacatacataacttttaatattatggagatatgtaggggcaaggaaggaagaaagaacatgcagggaaacagctagtaggagagaagtcattcttttggcacataagcacccgcctcggaagacctatttcagtttctcctgattgaagaattgcgctcctctgctggctcttactccatgaagagaagtggagaaattctgctactgcaacttggaaacatggcttgttagtataggataaaagtagtctgttggcatatgaaactgaggaggcctgggctgcagtggaggtgtgttccctactgctgagtaatcagaaggccactgcaggcagtgcaacctcgagctgcttctggaggcttcttgttcaatgaactgggtggttataggttactttcatcaaagtgggcttccctggttcagacggtagagtgtctgcctgcagagcgggagacctggcttcgatccccaggtcaggaagatcccctggagaaggaaatggcaacccactccagtattcttgcctggaaaattccatggatggaggagcctggtaggctacagtccgtggagttgcaaagagctggacacgactgagcaacttcagtagttcatcaaagtatcctgtcctagagtgggtattttgcctacccctgacttgggttctaaatctgatcctgaacttagatacttacttagatgagtgccttggacttcccaggctcagaactggcatcagtaaaccatccctgggagattgaggagacaggaagtaacgtacaaggcagaagtggggacagtgaagacacttattgtttaaagtctactgtttctgtatataacagactttctccctgctgggtttttttgtttttttgatgagcagagttctgtctcttaatctcttttctctgagatccggacctggatatattttgctggttatccttttggcttattttaaaaattattttggaatgatttcaagtttatgtaaatgtcaccagaactactacaaagagcttgcatatccatgccatgcaggctccccagttgttaagatttcactgcatttgccctctcacccagtctctgtttctatcatatgtatatatttttgtgaaccttgtgaaaatgagctctcgataggtggatagctcttatctcctctgaacacttccagtttacatttctcccaaacaaggacatgcttttacatattagcatttgctgttgttcaactgcttggttgtgtcccactttttgcgaccccatggactgaagcactccaagcttccctgtccttcagtatttcccagagtttgctcagactcacgtccattgagtcaatgaagctatccaactgtctcatcttctctcaccctcttctcctgccctcaatctttcccagtatcggtcttttccaatgagtcggcttttcgcatcaggtggccaaagtgttggagcttcagcttcagcatcagtccttccagtgaatattcaggattgatttcctttaggattgactgggtttgatctccttgcagtccaagggactctcaagagtcttctccaatgcagttcaaaagcatcagttcttcagcactcagccttctttgtggtccaactctcacatctgtacatgactactggaaaaaccatagcttcgactatatggacctttgtcagcaaagtgatatctctgctttttaatactctctctaggtttgtcatagcttttcttccaagaagcaagtgtcctttaatttcatggctgcagttaccatctgcagtgattttggagcccgtgaaaaaatctgtcactgcttgcattttttccccatctatttgctatgaagtgatggaaccagatgccatgatttttgctttttgaatgttgagttttaagccagctttttcactctcctctttcaccttcatcaagagatctttagttcctcttcactttctgccattaaagtggtatcatctgcatatttgaggttgttggtatttctcccagcttatcttgattccagtttgtgattcatcaaacctggcgttttgcatgatgtactctgcatataggttaaataagcagagtgacaatatacagccttgtcatactcctttcctttgaacaggtccttccttccatgtcctattctaactattggttcctcacctgcatactcgtttctcaggaaacaaataaggtggtctggtattcccatctcttcaagaattttccacaatttgttgtgatccacattgtcagaggctttcactgtgatcaatgagtgttggcaatttgatctctggttcctctgccttttctaaatctagcttatatgcctggaagtttttggttcatgtgctgctgaagcctgctgaaggattttgagcgtaaccttacatttcagcatgcagctccctaaatcaggaaatcaacaatgagtcagtactaccattcagtgtacagaccccatttaagttttgccaacttttccgataatctctttttcttttttatccaggatcctgtcgaggagcacgttgcatttagttgttaatgtctcttcagactcacttactgtggacagtcttttggcctttccctggcatttatatctttgacaggtttagagagcaggctttacattctatgggatgacccttagcctggattgagctgtttcctcatgagtaaactcaggtcatgagctctcagcaggatcaggcacagaaatgatgtgatgtacagtcattaccaggggtacatgatgtctgtcatccactgtttttagatgttaaacttgatatctggtcatgtcagtgccctttacatttctttaccttcaagtcactgttcttcttttccagttgcttagtcttttgtgggaaggtgttcgaagatttcagtgatcatcttgcttctgaagatgcctcctcccactggatctagggtccattggcaacactcaacctgcctcagttgaaggaaatggcagtgtacgccagtactcttgcctggaaagttctatggacagaggagccttttgggctccagtctgtggggttgccaagagtcggacatgactgagcctaggccctatgcctgcctcagcggtggtttttctggcttgtgtttcgtctgtgtgtcttagtgttcgggatggaagagctttcctttgccactgtttgtttattttttataccagtgtggatttctgaagtttttcaatggactttaatttcttattattatttaacagattttttttaatgcttaaattgtccccagtctggtcagtaagccctgtgtgtgtctctgtaacacattcccaccgttggatcattcttaatggttcgtagctgaaagatgctgccttccctcagtgaagcatgggcttggctccctgaggagctgcttgtgcctctgcacccgatgaatcccagctgcagctgcctttctgctccctctgcagcgtggccagcctcaggagcagtttcccctgaggagcttgtcagcaggctgctgagtgcgctctgtgggctccgcatagcccccgggagacccacgtcttcggccgggcagtggggggtgtcacgcccctctttccaggtgcggttgggtctgcttctccagcactgttcaggatctccacatggccaccaggtaggaggacttgatggcatttctgcctgtttgactctcagctgccaagagctttggctgcttgagcacgtttctgtcgcccatccgcagaaaccatccctttcaagcagaatgccgtgtattacttgatcctgacaattctgaaacccagactacctaagcatatgttttccttaaatgggaatacctcctctataattcagaatcctttaaatttagctgaaggtcagagagcttgtttggaaatgataaatgtttcttggcagaattatttctctctcaactcctggggttttttgtagctcagtactttgaagcttgtagtagaattgactgcagtagacggaccgattcatttctcaacttaggatttgtcctttattcttggcgcatgtagttaataagaaataaaacttactacttatttgtggaaatgcaaatttgtgtcactgattacttcagtgaattataaaatcttttgtatttcagtcacttacagagaggacttcaagttcagtattaaaggtgacataaaaaaattttaccaaaggagggcagtccttggatatcaggaacaagaattgcagtagtaactctgctgagacctgaattgacgctgaaaccctggcaactttaggagttgcaagcataggaagcaaagatagagttccacttcattcactccgtgcggcgcctcccctccttggccgtgggctgtgcctcactctggccttcactcatatcattgattggggtagggaacaggcccgaagaagagtgtgctgctctaagcccactacagtaagtcccctccctgcaggcgctgttccgagagtgcgctcccaagtccagtttatttgtaagtcccacaaagttagcctaggtaacacggttggctatacagtactttaatacatctatataatacctttcacacaatacataaaaatcaaacacaaaaataagtcatttttgacaattaaaagccgttcagttttattaatatatatccatttcacatatagtcgaaataaaatcttttacagttcattgtgttgattaaaatgcagattacaggctctcagaagcatgtgacttaatgacggttatttctgtgatttacaaaacggaggctaatcatttagtaagcatggatgtacattaattccaagtagaaaagtcatttttaatgtttcagtacagtatattggaaagtatggtacaacagctggcatacaggggctggcatcgagtgaacaggccaaaagagttgctgactggaggagggagaggagggggagaaggtagagctgaagggtcgtcagcgacaggagacagaacaaactgcagtctcgctcacgcctggggactgtggcacaggttctggtttcttgctggattctgttctatgtaccctcttgaaaaaacggcccagtgacgtctggatagtagctctcctttttttctcatcatagatgacacagtagcagtggtttgcattctgaagggctgctgcagtcttcctgtcccgataagtttggttcccctgcctcaaaaactgacagtgcttcctcaggtagcactaacataggtgactggagctgcgaatacatgttaacttgaaggtttttgtgtgtaggggatttgctgtactccaaaaacaatttaaacaaagtatctccgttaatggatcactagattcatcagcattacttcctgccctctctaccttaacttcaacccaaagcgtaatacagactaactgatgagaggaatcataaaagtttctctgaaaagtacctactttttttctttcttttcttttttttttttttttttaagaaaagggactctaagagctcttaggtagaataacaacattttaaaaaagcattcaccacgagtggtaatactttttcctccaggctttattcttcatggtcttgggcagttttcataaggactctctcagtctgtttttaattggggtcctgcgactactaagttgtgtttggccccacattgggagaaagtgtggtgtaggggagggatgtaggggaggaagaatttctcctctaccctcttatctccacctgggcctaagaattaaactgacattaaacagataagcaggagaagagcgtaagtacactgttaaatcttatctgtacgtgggagtccccagaaaagaacgaagagccaaaaaaacagagttgggcttttatacactgaactggacaaagagaggtgaccagagagaggctggcagggcggttaatggtgggaaagcgactaggaagaccctggttggtttaacaaggcttatttgtgcagatttttcttgaccccgactccggtaataagcatgttgctttcctctgttatagggaggacatcttcccagtgagggttttattttttgctttcaggaagataaaagggaggtcagagtgcccttctcatacctgctgtttgttcagtgcctttagctcaatatcatccttatgccaaagaggccttttgggggatggtatattctgccacccttcacagacattgtttaccatgaggtattcacctggccccctgagacctaaaaacagctcctgctccgccctaaaaaaatagagaaacatggcttcttttttgttctgttttgccttttaagttactgcttcctcttctgtaaatgaggatagtaatagtttgagtctggtaggattgtattaaatgagctgaggcaaataaaatgatgtacttagaaagggctcagtaaatattattgtgggggaagaaaaccagttttccctctatccttctagatttttgtcttttataaaaagacagactaatgagggaaaaacgacagatgtgcacacatgggagctacccaggaaaaacaaaggaactccgaaatggcgcgagcccatgccttaaatactgtctctagctaaagatgaaacacggtgaggtggggggagtcagttatgggtggttatcaggaaaagcacactaaacaagggtgaggttgttaggcagtttaaagcggttgccttctgcactgataagagtttctggacatttcgagtctttctcctgttcctgaaactggaggaatatacccctacaaatgggagatttcccttttaagtataaatgtctcttaggaaaagtaacttctcacttttcggagcttcacctgtgtctgctggttcttaaaaataacctcaaaatagtcagtatgtcaaagaggcatattttgggatgatatattttgttccccttcattatctgaaacagataaacaaaatgcattgctgcttagctgctccttcttgtatttgaaacatttgtttagaagcaacccaaaccaagataatctgtatttaagaatcataaaggggaaaaaacaatgttttggctttaagacagtttgctttgaattctcctgcagtcggagctggcagggttcatgtgctccagctgagaggccgtgctgttaccttctggcagtcccgtatgcagatgccgttatattaattacagtagaaaacctgattaacttgaaagtccgtaactgtcagtgaagcagctgctttagctctgaagcaggttttcttcctccttcctcctgtcattctcccatttttcatctcttctttagagaactgctgagactgcccaggaggccctcagagcccccggcttgctccgtcacctttcgatctgcagctgtagcagttcaggggagctctcctaattaatttcacgtctagttgaaaaacaaccagacactgcctagccccctcatttttctttcaacagttaaaacctgatggaatcctggaattttaaaactggaaagggtgtaaagatgatctaatccagatctctagttcacagatgagaaatctgaggctgagagaaacaagtgggttgccagagtcacagggccagtcagcggggaggccccaggtcagagcgccaccctggccggtgctctgcccacccccctgctgtgctccatcctcaccaaaccatttgccaaggggagcgaggagtgcaaccctctagtttcagcttcagttttctccatgctcttgttcaaatcttgtagacacattgaagagcaatggaaaaaactaaagattagtgggagaagcaaagagcttggacaacgacatattgaaaaccagatggagatatccatattgaagacctttctctgtctagtaagttgcacacacaaccctagccaagcgcctggaaacaaaaattcgaactagactcactgtcagccccctcgcccattgcactggcctacggctgtttgactccagcaagtttatttatagtgactgtttctgtcactgcagagatgggggtgtgatactttgggtcagatgaataatgggtgtgtctgctgtggttttggccagtgccacatggtttgctggttttcctatagtctcagaggtgttgagattgctccctttggtcctgaaaaatggttagttttcgttctctgttacccactctcctggcagcagcagtagtcacgactcatttagactcactgttgttattctggaccggcttttgttacgggccgtatgaagggtgttagtatgagcttactcagccacctgagctctgaggaggactgggaaaggagaggaagataggaagtgccggtgagagcgggtccagcaggagccctcctgctcagccagagtctggcgggtaaatcctgccgctgaatgggccagtcctgttctgccgtccacctctgctctccatgttgagatgaagggcgtttttaggaatgacggttgctcctaaactattcatggtactggaccgttcatcatattactggatttttctgagtacttagtagagccacttacggctttctttaggcagttctcaatgagcaagcaaactaacgctcactattttttagtcattgtgttgggtgttgaggatacagagagaaatgtgatggttcttcctgcctttggtaattataaacttaggactagaatagtctgaagaggtgagcaagatttgccatcccaaaatgtgtctctttggtatgagaattagtttaggcttggttgttgttaaagaaacgaaaagctcagcaagagtttttatcttcctcaccttaactgcctaaatgaatttatatagagggcctgtcgccagagctagctacagtgtagtatgaacttggtgtaatagttgagggtcaaaatcttctctatgtccagttgtttctggatggcccagcaaacctttgtttaccaaacatttactcttctgtgaattgccttgtttccctttgaagacccagcccccgccccctctttttgttccaggataacgtatgtatctcgtttaacccgtctttcagatctctcatgttcagattccttatgtgtatgtaattaactttcattttctactgttaatctttctcatgtcaatttaattcttagccccagccagaggaaactaaaagggtagaggaaaattgtttttcctccctgacaactgtagtaaatgctgtttagttgtcagtgacgtatggagggactcaggactccctacttgctgagtgatcacacacgcaaggggctgtgtccccttgcttttagtttgtaagtcagaaattagaccagttgtctggtgtttttccctcgtgcttaataaatgccttgcatagagttgggccttcagttaacgttttgctttctcatctctttcccaggagaatagatttccgtgtttcactgtctggtattgctggtgtgcttctgctgaccaagtgatgtacttaacaggcagacgtgaaaggaagagcttaatgaaacgcataaaggggtctgagtgaaagccaacttgtttaaaccttgtgctgccatttgttggagggaagattttaaatagtgagtttgcagcagggtgggtagagctgaggggctccctggtggctcagtcgttagaccacttgcagcgcgggaaacctgggtttgatcccggggtcgggaagatcccttggagaaggagcaggccacccactccagtattcttgggcttccctggtagctcagatggtaaagaatcttcctgcagtgcgggagacctgggttccatcccggggtcgggaagatcccctggaggagggcatggcagccccctccagtgttcttgcctggagaatcccgtggacagaggagcctggtgggctggagtccacagggttgtacacagttggacacgactgaagggacgcatgcaggtagaggcaggcagaagtaggacaaccttttaaatgagtctggcctctctcgcttcagttacataaacagaataaatagcttatgaacggtttaatgcagctcatggttaaatgactaaagcaaatactgtttcagttggtaccaccctaaattttaatgaagatatgtgtatttggcttcaaatacagatcggctttctaacagcctaaggactgtgtgtctgtgcctttctgagcaaacacgaagttgcctgaatcttagacttgggcaggcactgtcactgaccaagttggggagtgattgagttcggaatcagagagttccagtcaacaaatttctggttccttttcccatatagaagttctcatatgttaggaagccttttgttttctcttgagtattatttgatctgttttgtggaagcttgcagtatagatgagtgtatcctgaaaggatatttctgagatagatcaaatcttccttgatgtgcttggatttatcctaacaggtagtcttttcccctttgtcttacttggggtcttgtcttccataaactgaaagaatatgatttgatcagagatattgatcttaattaagcattcagtgttttaagaaaacaaatgacttggcagctgggatgctgttaccagctatcagagaaatgaaccagaaaagattctatgcttatgcacactcgaataacattttatttcaatgtatgtgtgttaaaagactacacacatttagtatatagataagggaaataaactaaaactgcatgtggcagagtcattttaaagaacctttctgtgttcaggtgttaggttttgtgtcacaaggaaggtttttattttgatttgtgttcagtccttggggtttccgaggtagcatggtggtaaagaatcactctctcaatgcaagagacacaggagatgagggttctatccctgggttggaaagatcccctggagtaggaagtggtgacccactctggtattcttgcctggaaaattccatggatgaggagcctgacaagctgcagtccacgatgtcgcaaagagtcgtacgcatctgaggattaatgcacgtattcagtccttggactcatgtcccagcagcatagtcttctctggttttgtcaatttaatgtcctttgattgagtccttgtaaactccttaggctgtccctccactgattgaaactgggtcaggaaggggagattaggccactgccacctttctggaaagaaagaactgctctgggggcgagccagagaggggactcctgtgtgatttaagaaacgtctcctgactgggatgtttttctggtatctccttccaccaagagctccctagaagtttctcttctaggaggctgacatctaatgggatctctgcgttagtctctgtctgcccctcctcactcttctctctgtactcctgtctccttctacccccatccccgcccaggcccgctgagctgcatttccttcccacccaaggaagagaagcgcctccagcagatggtggactgcctgccctgcgtcttgatcctcggccaggactgtaatgtcaagtgccagctgttgaacctgctcttgggggtgcaggtgcttcccaccaacaagctgggcagtgagaactgtaagcttcggcgcctccgcttcacctatgggactcagactcgggtcagcctggcgctccctgaccagtatgaactagtgcacacgctggctgctcaccagggcaactgggagaccgtccctgaggaggacctggaggcccgggaggacagtgaggacgctgcccgcgttctggccgaactggaggtgacgatgcgccatgctctcttacaggtaccggtctcgtccttacacgggtgcacttgtaggcaccagctttcattgtgcctgagctttctcagaaagtagtttggcagtgtgtactgtgggctctgagcatcagcagatagagtcaaaggaacgtgatctaggaagttgaaaaccagacaaggctgtagcagtgtccatccccgcctctacggctgtgctgcaaagccctgggcagtttgtctaatccctttctaaaactgaagaatgtgatacttatatctcagcctgcctttacagaaagagggtcagggttagcaatcctttttcatttcttacaggaaggcatggctagaattgtctctagccatccctttctaaaaggaacaatcatatgattgatgttcttacagagctgagaacaagtgaataacttctgagtttttccttagatctgccttcatttactaagtgagacaggtcctgtctcctactttctaagggacttcagaacacaaggacagatctggctcaaataaagaggtatggagatcctatcacctgaagaatgtttctctcttgaagtaaactcctgaagaggacacaggtcttgtggcatttcctaaaagataattttatctgtcttgtatttatatctctacgtaggaaggacctgtctcttgtgcaaggcttcctttgctactatatagctaggactagactatgttattagaccaaaaggtgacaggcacagcatgtgaatgtgtcaggagaatggggctgggcagagaaggtgcctgtgtcagggatcaggagctggcaggaataaaagaagcagacatgctcagagcagagagttcgtcatcttgattagctgtgccaggaaggaggggctcgtttggcaggacttggagagcggtttcttcttcacttcacctactcctgttctagaaggcttggtctctcagtcagtgagtgaggcctttgattgtggctttggcttacgattctctgaaagtagaaactgtcatctcgtttctttccagagtccagttatcttttatctcaataaatgctagagggatttagtatacaagccagcattttctctcagctcagtttcactggtggctttcttctgtgttcagactgagagcgtgcacttcttagctccaggacaatgcgagagttctcggatgactctgactgatccttgtttattgactgagcctgctcagttgactcataagctttgtaggtgtatgatccaagcacagtctctctatagtattctgttctggtctagttacttcagtttctaagagctcagtggttttccaacttttttagattttaattcatgcttagaaatagcattttattattaggaccctaacatacatacgtgtgtgcatttggaataaagtttcatgaaacagtacttttacttcttgcaaaacacactgatgttttcttctctattatatttgacttcattttttggaaaaatgatagcaacccactaaattgatgatctgacaatgtattctgacttacagcttaaaaaacactgttaagtagctgaaaggactgctcttggttgggtggtgatttttcctgttcttgcattttaaaaacagtcttggaatgtgaacaaagccatctgtaggacagttgcgttatttgattgatttctctgtgtcccttcattttgttggttttgatttttaatgctcatttacttttgtcccatgaggtgagctgataaagtcacagaaaagaaaatgagagctatttcccaagtagtgtgtgtgtgtgcgcgcatgcgttcgtctctcagtcatgtctgagtctttgcgaccccatagattgtagcctccaaggctcctctgcccatgaggttctcgaggcaagagtactggagtgggctgccatttccttctccaggggactttcccgacccagggatcgaacccgggtctcctgcactgcaggcagatcttctaccgtctgagccaccagggaagccctgagcacatgtcttactggtgagagttcccagcgatgctcaaggagtacattgttgcttagtcgctcagttgtgtccgactctgggaccccgtggactatagcctgcgaggctcctctgtctgtggaatttcccaggcaaaaacactggagtgagttcccatttccttctccaggggatcttcccgacccagagattgaatccccgtctcctgcattggctggcagattctttaccacttagccaccagggagacccccatgtatatatagtaagcaatcaaactgagttaacaattaagaaggctgcttggctgggagggaagttaagatacctaatcagtttcctctctgcacggttgaaatatgtatagattctctttcatgagaaatatccttctcttttcttgaagaattttctagcctcccgtgtcctgtttcatgtggtttctgaggcttctatagtaatgtttctttggatctgctttatacggcagtgattttgatgtggaaacagccacggacccccacatttctaactttagactcccttgatggtgagcctcagaggggcctcagcctctgtggtgctcaggctctgctctgcctctgtcatcagactcctgtctccattggcttactgctgggagcatttcctaagctaccttgaagatttttcttgacagtgagaaagatcctttttttagctccagttatatttatttatttatttattttttatttttttttccagttatatttagaaccagagaattagctctaaacagcccttcaatttggttcctaaaaggggtcgtaaagaaaggaaacatttagctaaaggaaaccaagattgaattaggggaaatctgatgttcatttttaactgtcaaattactaaagcagaatttccccttaccctcttacacaatggtcattcttctaatatgttactttaaagtcctcataaattagccattttcagtttgttccagagtaaggcaactcacatggaccccataccacgtggtacccacatgggatattgcagtattcctagtgttttagctccgggtcccctgagagtctcagttcataattcaataatagagaaatactgtcaggccattagttcctgaaacctcatttagtgttaaaacgtggtcattttccagctggcagtgcattctgcccttccccgtgctcactagtcttgtctgcatgtgcatgcttccccatcctgaccttcaccccctttctggcatatacctcggccatgtgcatgcttccccatcctgaccttcgccccctttctggcttatacctcggctcgttttctgttttgttccatttacaagtccagcgccagacggtcgtctgccttagaatcgcctcagtctgatgcatgtaagtctagatgtggtttccctatgacacctataagaaaaggaagaaaaagaaatggaggtcgttaaacttcctcagcctgagatggcattttcctgcagcctgacggtggatttcatcttcgatggctgtttcgcagccgtcagcgctctgttcttagcctgtttacccctcccaggtgttttctggccctgcggacaaacacgcgtgtcacatggccgtggggctgtcacaccgtcatggtgacgggctcctggcgatgtctgggaaggggtatttccgggaacttaagtacactgatgtttccaagaaaggtctaatgacttgcaaataaacttatttttttcctttgctactttgaactctaatgagttgaaatagttaaattttctctttataaccctcagtagccatcaatggaagtaatctatttgtcatttcatagtgacattgatatttttactttttaatctttaaaaattaaaagttgttttatttgatatataattatttagttgatttacaatgttgtacagtaaagtgattcagtcatatatatatatatatatatatgtatgcatgttgtgtacgtctgtatatatgttctttttctcttttccattatggttttctgcaggatgttgagtgtagttctcggtgctatacaggagaagcctcttgtttctctgttttatatatagtagtttgtatctgctaatcccagactcttacttagtttattcctcctcacccactttcctctttggtgaccaggagtttgtttcctttgtctgtgagtctgtttatgtttcataaataagtttgtatcatgtcttagattctacatgtaagtggcatcatggggcgtttctctttctcacttatttcacttggtgtgatgctctctggctccgtccaggttgctgcagatggcactattccgttctctttgaggctgagtagaagggtacattgtgtatatatgtagcacatcttctttctccattccactgtgggtggatgcttggttgctcccatgtcttggctattgtaaatagtgctgccgtgaacattagggtgcctgtgtgcctgtgtcttttcaaatcatagttttctctggacatatgcccagcagtgggactgctgaatcatagggcaactctatttttggttttttaaggaacttccatactgttctccatagtggctatactaatttacattcttaccaacagtgtaggaggcttctccacaccctcttcaccatttgttaatttgtagagtttttaatgatggcccttctgactggtgtgcgatggtacctcactgtagttttattctgctgttgcgatctattttttttaaaattttattggcgtataggtgatgtatcgtgttgtgttagtttcggagtacagcagagtgaatcagtcacacgtataaccattctttttcagattcttttcccatataggtccttacagagtgttgagtagagttccctgtgctgtaatagtaggtcctcattagctatctcttacatacagcagtgtgtgtgtgtcagtcacagtctctcagtttatccttccccctcttttcctctctgacaagcctaaatttgttttctacatctgtgactccatttctgttctgtaaataagtttatttgtaccatttttgtttagattccacacataagcaatatatatgatatttgtctttccctgcctgcctgacttcactcagtgtgacagtctctgggtccgtccgtgttgctgcaaatggccttatgttgttctttcttatggctgagtgatattccactgtctgtgtgtaccacatcttctttatccatccctcggtcatctccttctagttttgatttgcacttctctaataattactgacgttgagcatcttttcatgtgtctgttggccatctgtatgtcttctttggagaaacttgtatttaggtcttctcattttttgattgggtcgtttgtttttttggttattgagttatgtgagctatatgtgtatttaggaaattaaacccttgtcagtcacatcatttgcaaatattttctctcagtctgtatattgttttttcattttgattattgattattcatattgattattcttttcattttgctgtggaaaagcttataggtttgattaggtcccatttgtttatttttgcttttatttctattgccttgggatactgactcatgagctttccggacactactttgctgaagagacagtctttctccattgtatatcttgcttcctttgttggagattaattgaccataggtgtgtgggtctgtttctaagctctctgttctgtcccattgatccatacagacaatgttttttttttttttaatttctcagcagttaatactttcacaaccccaaatcaaagtaaaaatgataaatttatgcaaaatttaaaccctcaaatttattaaacattgttgctagaaaactgtcttctttcaatttttgtttaatttttggcatttgttttggtgccttatgaaactaaatttgttaaatgttgcctacttttaagttagataccatgtcttctctggaatgtatctcgattgaagggtaaacatatgaaagaagtttgggtgatagtcttttatctgacggtaagcagatagttttggaaaagagagtatatggaattaggtcaaagatggccatttccaagggaaaaagaacaaagttggagtaatatgtgtaagagaaataaagaatgctattctaaaaatatacattaaaataaagaaaccattattttatggggcacaaagaaaggggaactaaaagtaatgtgttaaaaaaggatatgggaagttcaggcaaatgctgaatataagttccttctaggcagtaattctgtgttctttgaattcaacgtctctctgcctttcctctaacacacactaacatacacagtgaaatatagccaatacattgctctttgctaacaaacctggtaatacttactataggttaatttacctattaaggatatgtatgctttagaggcgcgattctttttaaaatcccaatgctcgctctagtggccttgatccctcttaaaaagactacttaaagggctcttttttcaattcaccaccacttgttcacttttggccttccaagtttaactctttgggagaaaatctggcagagattatggtcttaatcttccttttttgagcagagcaggggtttttacttgcagccaacatatacttttaacacagaaagctaggactgttacagtccctgaaattgtcttgtccatcctttattcttctctcagaacttccctaacaccaggccagacaattcctgacacagtgggcctcagtcgctgtttatacacagcaactgaggctttgtagtcagaggaccctggatgtacagcctggcttggctacttaaccgtgtgactgtggtgctagggcaccccccatttgtaaaacagaagtggtaatccgtgtgttttagggctggtgtgaggcttacgagaggctaggtgtaaagcagctagcacagtgtctggcccttactaagcctccctttgaatgaattgagaggaggatttcctcctctctcagacacctatctgttccctgacaaccatccatactggaactccttccattgtgaaacttaagcccttctggttcctgcttacttagacttattattgtgctccatttagaagcaaagttcttcataattattaggaagtgcttttgtaataaaattaaagaagagagaggtgttataaaatacagaagttaaagttataaagttaaaaggtaactttcacctttgttcagacgcttctttcttctccattcttctgttgactttcttgatgagtctagtgaatggtgagagtctaataaatggtgagagaattcacattcccaattctgtatctgtgggtccctggatgtttgaatatccacacagtagaatgcctggaggctatccagtacctccttgtcaacttgtgtggtgtctggttcctcacagtgtgaaatcagatggttttgatccttcaggctccgtgcttgtgagctgagatgcagacctaaagcctctgctttgatgtgtgtggggtcgtaccacacttccgcttttagcacggtggcctcatgttcctgtggctagttgagggctttggttgggattatgggtttcctcaagtcttgttctggtctgtgagttaccactccctacttttactggctagggagatgagctagtatccattttatgctgactgctggggtgaagccctgggttggcactgctgcttgtggcctgttagattctagaaagcagctcagtcacagctccccactggagagtgttcaagagtcagggtgttttctacagtgtaacaggaagagggggcatgcatggactgtgtgtgctcagtggtgtctgactctttgcaacaccgtggagggatgtatctgccttgctatataactgacatttaagagtgatagtgatttcagagaactgtacacaaatgaggaagaatcagccccgtgtaaaatggggaaaacttcctattgttctgtgagagtgggcgtgggcggagaattgatggtgatggtcactgggacatggagacagggcctggagtccgggatgcgtcagctgttaagcgaggggtagggccatatcgttctgtgctgcttttctgtgtgatggaaggaggttgcagaactgtagacaaaacaaagacattcatgaccgatctgagtgtgtgattgtcttctgtttgaactgttggttaagacgaccatccatagctatcgctgagggtgtaatgtgctgtgagccatagagaaagagtcctcatcagtcagagccagtattcttaggaagtggtcaggcttcagtgactgaaccatttcttcttggcacttatgatggtgtcattttatattaaaaaaaaaacaaccaaagaggaaaatcctggtgtttgcagagtagcagtttgcttttttattacattctcttaatcttgccaagaaaattgatggtaatatatcagcttctgtagaatccacagatttttgcagatatattataaaagagatatctctttaggaattttctgtgatttaagatgggaattatggcatactcttctgattccctggattcttcttccttgactgatttcagagcttcctcactgcttcattcttggaatagatgcaaacagcagttccagataaatgtgtgagatatgggttaaaaaatagacagttttacatatgatgattgaaaatggttttgagcaaatagtaaaggcatcattcattcatccagtaattgtacatttatttatttaatgttcagtaagtgcaaacactgttctaagtgccaggaaggagtacagccttccatgaaatagtctgaggtcagtcttccctctcaggtggccgtaatatatgggccaggaacagggctcatcctctctgtgaattttttttcactccctgtctccaggagacagtgcggcttccctttttgtttataaccgtcaggcatgagtcatccctctgccgtgagtattgcagaatcacgtatcacattccagtctagtttgtactgctgccagggtctcagccagcagctctttttgcctgtctttcaacagtcaagatagtcagaacagtgagacagactacacaaattaattaactggggaatagagaagagagagcacagtacttgttttctatccgtttttgtttgtgcaagatacattaaggagtagataccttctttctaggtgccaattcaccaggcagtgtctaccatcagagttcattttaggggaatttttaaaacttgatgtatagctgacatatagtattatatatgttacaggaagaaaatgtagtggttcactgtttttaaaggttatatttcatttatagttattataaaatatgggctatattccctgaagcttatttattttatacacagaagtttgtacctcataatccttgaccccaatctttcccatctctccttccttgtccgcacgggtaaccactagttttttgtctgtgcctttgtgtctgtttcctttttgttataatcactagcttgttttatttcttggatgccacttgtgcgtgagatcatgcagtgtgtgtctttctgtgtccgtttcccttggcacagtgccctccaggtccatccgtgtgcagatgggcacattacattatttttatggctgagtagtattccattgtgtgtgtgtgtgtgtgtgtgtgtgtgtgtattatatagtgaaagtgttagttgctcagtcatccaattctgtgaccccataaactgtagcccatcagattcctctgtccatgtaattctccaggcaagaatactggagtgggtagccattcccttctccaggggatcttctggtcccatggattgaacccaggtcctcctacatttgcagacagattttttttaccatctgaaccaccatggaggtgtaggggtgtgtgttgttttgtgtgtgtgtgtgtgtgtgtgtgtgtgtgtgtgtgtgtgtgtgtgtgtgtgtgtgtgtgtgtgtgtgtgtgtgtgtgtgtgtgtgtgtgtgtgtgtgtgtgtacatatatacaccacatcttctctatccactaaattcttttttcaaaaatgaatttgcacttttgagcaaataaagtcagctctcctttacaaaggatattggttctacggcagctttggctgccaagttctgttgcacacataaaatggaaatttactttaaattttttaaaaaatccatcaaataaacaagcagcaaaattcttcctgaaagctttctaaacaatacttacttcggtttgaatatttagacttttttctcttaatatttctctaataagtttgattgatttatatctttaaaaagatatatttaagacagaagccatttaacaaaatttttaaaagccactgtcacctataattatcttgttataacttcatttcttgaaattctcttctagtctgtaattactaaatgtaattagaatgttggcatttaagtgattgcatgctatactttggaccttaaatgtccttatgtaccctctgttttgaatgtgcctcatgaaacgattcatactctagcactgtgactcagggcagtgaaagggggcttgtttcaaatagcagagtgagtgtcagattagtcttccaatcagaaaacattccatgcagtttgaggcacaggtgaatagcagatttcttcctggcataggcttggctagaaaacaagtagatttatacagtgtttgctcaaattacaaatgatgagatgctaaaagcacttttagggagttcaaagtggccagacaaatgaaagttctgtggcctacctgagaatgaaatttatgaattctttgttgaggaaaaaggtgagacttttgtactttagtggaaataagagcttgctgtctctcactctctgtcctttagtacaggcacacacgcacgcacgcgacacacacacacacacacacttacacacagtacaagaaacaataagctggcatttcccagcccttctccattgtctagagaaggagatcaaaaagaaaaactctttaaaacattttagaattctgcaaaggattgattttgagtctgcagacttcagagttggtgtgcctgcaggggtaatataggcatgagtctccagatcaatgcttaggtctggagtgccaggcaaagtacacaatttcagaggtttagaggagcaaaatttatttccctccatattcccatatggatggaaatgtatgctcttaagtgagtcgagatccttaatgaagaagtagaatgataagcagaaactactagctagggaaatgacctgtttaggagttgggtgtatcagtgatgattgagttcaaacataggtaacaatcagaaaaataggggtttgcttaagcaagacaagaggttaatatatttttcccttatataagtccaaagctaggcagttgagagctggtgtggcagctctgtagtcatcagagatccaagctcccagtctctttttgcttcctcgtcctcagggctggcttcccccctcaggattgcccagggctgtaggagggccactgctgctctgtcctcacacctgcgctccaggcaggaagggcagggccagagcgtgcactagctagcagagtcagccctttgaagagctgtctgttgtcctacctactattggctgcccctccataaaagacattgccttcccaatgatgcagaagttagatattgggtaggcagaccgtagtctctgccagaccaagtgatcatgagcataaaggtgttcctgagacctagatggctgagaccttgggatgtttgccaactcttaaggtaggatggtaatgtttgacagatctaacctttagtttgctgcttgattgattgattcagcagtattaaggacttaatctataccaggcactgaaattacaggagtgaaaaagatagacatgttccctctctcggaagagtttataggctaattgggggaaaaaaaaaaaaaaaacttgtttttaaataaataaattataagtatataagtgtattgactattaagagaaggagaagtagagagtactcccctagtagggatttcttattaggaaagactccagaagggtatgacactgtatacactgcatgggagttagaaagttgaggatgagtcaggttagaaagagggggaggaatgttccaggcagatccactcccagtctgagagttcgttcttcatcagagggaatcagcgggagtttccaaagcaacaaaagggactccaggttctttttttacctaaaatggctgaaaggactgccatcctttctacttacttatttttccactgtctcttgatgagtgcctgcctgcttaggtggcaccagggagtgttggtaaccgaggaaggagggggacaagtgattggggcatatactgaagcccagttgccccatcatagatctgcattttggtctcaatgtgggactccggggaggcaaggactggttctgagcctgaagtgctgatatgaccccgttccccttccaggaagtggacattgtggtagcaccgtgccaaggcctccggcccacagtggatgttctgggtgacttggtgaatgatttcttgcctgtgataacctatgcactccacaaagatgaactctctgagagggatgagcaagagcttcaggaaatccgaaagtatttctcctttcccatattctttttcaaagtgccgaagctgggctcggagataatcgactcctccactgaaagaatggagagtgaaagatcaccacttcatcgccagctgactgacctgggctatctgagcagcggccactgtaactgtggggcccccggccaggacaccaaagctcagagcatgttggtggagcaaagcgagaagctgagacacttgaacacgttttctcaccaggtgctgcagactcgcctggtggacgcagccaaggccctgaacctggtgcactgccgctgcctcgacatcttcattaaccaggcttttgacatgcagcgggacctgcagattacgcccaaacgtctggaatacactcgaaaaaaggagaatgagctgtacgaatcattgatgaatattgccaaccggaagcaagaggaaatgaaggacatgatcgttgagactcttaacaccatgaaggaggaacttctggatgatgctgccaacatggagttcaaaggtgggtcctggagagagcttggtaggatgcaggaactggggcatcctcgaaccctttccagctggcatagagtacatcagttctgaagcccaaaggaacctaccccaacggggcccgttagcagcagccgacctgaaatcattgagtggagttggcctctcttgctctgagaggccttcttggaaaagtctgccgccattccttcccatttgataaatccatcccaatactgctctttggtctccagttcttattgtatccccttgcctttttaagactggagaagagctgcctgaagaaggtcgctgagtcatgctttcatcctgactcctttgtcatggcccatgctgctttgttggttcttttttgtgtgtcatggtctcattttctttccagggtgctcctgagacctaactcagaaggatttcccaaagtagcagttttagcttttctggcattcctatccttcatgaataaccgttaacaaaactgggccaagtgcttagtcatgtcttttggtatctgaggtctgggtgctactgactttgtatagtgactcctgcgtgaacattagctctcagttcagttcagttgctcagtcatgtccaactctttttgaccccgtggactacagcacaccaggcctccctgtccagcaccaactcctggagttttctcaaactcatgtccattgagtcagtgatgccatccaaccatctcatcctctgtcatccccttctcctcctgccttcagtctttcccaggatcagggtcatttccagtgagtcagctcttcacatcaagtggtcaaagtattggagtttcagcttcagcatcagtccttccaatgaatattcaggactgatttcctttaggattgactggttggatctccttgcagtccaagggactctcaagaatcttctccagtaccacagttcaaaagcatcaattctttgatgctaagctttctttatagtccagctctcacattcatacgtgactactgaaaaaacaccatagatttgactagacaggccttgccgacaaagtaatgtctctgcttttgaatatactatctaggttggtcataacttttttccaaggagtaagcatcttttaatttcctggctgcagtcaccatctgcagtgattttggagcacaagaaaatagtctgtcactgtttccattgtttctccatctatttgccatgaagtgatgagactggatgtcatgatcttagttttttgaatgttgagctttaagccaactttttcactctcctctttcactttcatcaagaggctctttagttcctctttactttctgtcataagagtgatgtcatctgcatatctgaggttattgatatttcccctggcagtcttgattccagcttgtgcttcatccagcctagtatttctcattatgtaccctgcatataagttaaataaatagggtaacagtatacagccttgatgtactcctttcccaatttgaaaccagtccgttgtttcatgtccaattctaactgttgcttcttgacctgtatacagatttctcaggagcaggtcaggtggtctgatattcccatctctttcagaattttccacagtttgttgtgatccacacagtcaaaggctttggcataatcaataaagcagaagtagatgtttttctggaactctcttgctttttccatgatccagaggatgttggcaattagatctctggttcctctgcctttttaaatccagcttgaacatctggaagttctcagttcatatactgttgaagcctggcttaaagaattttgagcattgctttgctaggtgtgagataagtgcaatggtgcagtagtttgaacattctttggcattgcctttctttgggattggaatgaaaacggaccttttccagtcctgtggccactgctgagttttccaaatttgctggcatattgagtgaagcactttcacagcatcatctttaaagatttgaaagagctcaactgaaattccatcagctcctctagctttgttcgtagtgatgcttcctaaggcccacttgactttgcactccaggatgtctggctctaggtgagtgatcacaccattctgattatctgggtcatgaagatcttttttgtatagttcttctgtgtattcttgccaccttttcttaatatcttctgcttctgttaggtccataccatttctgtcctttattgtgcccatctttgtatgaaagtttcccttggtagttctgattttcttgaagaaatctctgtctttcccattctgttgttttcctcatttcttttcattgatcactgaggaaggctttcttatctctcctgctgtttttggaactctgcattcagatgggtatatctttccttttctcctttgccttttgcttctcttcttttctcagctatttgtaaggcctcctcagacaaccattttgcctttttgcatttctttttcttggggatggtcttgatcactgccttctgtacaatgtcacaaacttccatccatagttcttaacatagtagaacagcctccataggtgggttctgcttattgccattttctagacaagggaattaagactcagatagcttcagtaatttgctcaaggtcacacagatactaagtaatagaggcagaacttgaatctagacagtctgattcctgagctcatactcataatttccacacttactgcttctttatctattccctgttattgatgttaccatcttcctgggaaccagcttcagaacctcagcatgaggacttccctggcggtccagaggttcagactccacacttgcagtgcaggggtacacattgtgtatccttgaggcaataaaagcgttccagttttactttttatttctctagtaattgattagaattgaattcttgactcttgtatttttctcattaatatgctaggaagtgtgaaatattacaaagattagaggctttggaattcatcaactttgcgttcaaatgctaggtatattattccctaactctaccatcccctcctagtgcccagtttattctctttttgaggctttttcctgacttgtcaaatataaccagtgatacccttctgacgtgttgttagggttaaattagattagatacataaaatacttcctccccttctgtaaatgtgatgtaagagctgacagatcagtaggttcattctgtacaggtgctccttcaggactcttagatacctcaaatggttgaggattgcgtggcccctcatgctgagagtcagaggtagtcagccatgtctgttttgtagccatcagcatgctagctccttgggtccaactttattcagtgtacctgcccattcccctcacaaccaactagggttttgctgtgcctccatagatgtcattgtccctgagaatggagagccagtgggcaccagagagatcaaatgctgcatccgacagatccaggagctcatcatttcccggcttaatcaagcagtggctaacaagctgatcagctccgtggattacctacgtgagagcttcgttggaaccctggaacggtgtctgcagagcctggagaagtctcaggatgtctcagttcatatcaccagtaattatctcaaacaggtactcagagggtagttaagagctggccacagataatacatgaaacagaatccacccacgagcccagcatcaagttagccaagaatttccctttcagtgttttcgccagtccagtttgaattttgttttcctgtctcatgaccactgtctgtgggaggtgcttgtgaactgtcaggttgcagttcagccaatgagcaacatgatgaagatgaagtagaggggtcccattggccacaaaacagatgaccaccctgccttgactctgcacatacactgaggcgtagatttgggagccttgaaactggaccatgttcttgaaataaatatcatttgttgcatttttaattagccactttactcagggcatatatatattgactttcttattgtgtcttctttttcaggtcttaaatgctgcctatcatgttgaagtcacatttcactcagggtcctcagttacaaggatgctatgggagcaaatcaaacaggtagatgttttttagggaaagagttttcagtccctaattggctcaaatgaatctttgtcgctccagcaggaactaatgtctaggatatctgtcctagacaaactgatatctgtcggtataggtggctgtttgtcctgattttcctgcctggggaagttctgatttatgcctgttctgaaataattattaacagtgtcccctttaactcttaaaagtgatgtatctaaatgatattttatggagccataaaactctacttctctagctttttgatgtttctttgccccagcctaagtgttttctcagaaccaggctttgttaccaaagaccatgagtatgatgtattttctggtattcagtctggttcttatattgaattatttgctgatgttagaaagggatttatcaggcacccccagtactgattgtaatgtattgaggattcatgaacatgcattccaagtgtaatgttctttgatgttttccattggactgagccccagttttgtggtaggtgaaattggagaggggtgttgaacctcataagctctcgtcttaagatcctggcctgctgaatggtaatgcagcgaggaaggggttctagtggtccctgtctccacccctcagtgttctcactacccctgtcctgacagatcatccagcgcatcacttgggtgagcccacctgccgtcacactggagtggaagaggaaggtggcccaggaagccatcgagagcctcagtgcctccaagctggccaaaagcatttgcagccagttcaggactcggctcaacagttctcacgaggcctttgcagcttccttgcggcaggtgagtcttaggaaaggcgatgcaaccggatcaagcagagaggtgcctcatccgctgtggagtgctttatctactgccctctatgtaattgtttaaaaattgtcagtatattttctttctgttgtgttagaggataatactcagttacagggtgtttcatcgataaacgtttcgtgtggatgtttttctaactcgagagagaacggagaaaatgcagttaatttctcctcacttcactgagtgaggaatgaaaatcaaggggtaggaattttatatgaatttatatagtattttaggaatgagggacgaaaagggatggcattccagcttccatgtgtgtgcttagtcactcagtcatgtccgactctttgcagccccatggactgcagcttgccaggctccgtggggattctccaggcaagaatactggagtgggttaccatgccctccttcagaggatcttcccaacccagggatcaaacctaggtctcctgcaccacaggcagcttctttactatctgagccactactttcatagtagtttgcaattatgtgacatttgcttgcacctttaggggtgtgtgtgggtgtgtgcaggtgcatatgtgtacatgtttgtggaggggagggtgggtagatgtgattatacatccaggaggaaaatattattacttaatgagtgctcactacctgccaacccctgagttgcgttacatgcatcttacttctcacagttaccctcatgaggtagatatcgttatccctataataggcaaggaagccaaagctggggacctgataagccatattactttcttctttttctgtcccagctggaagctggccactcaggccggttggagaaaactgaagatctatggctaaaggttcggaaagatcatgctccccgcctggcacgcctttcgctggaaagccgttctttacaggatgtcttactgcatcgtgagtccttacttttcccctaggaaatgggaggaggcttctggatacctaacatcctcaggcccaacctcggagaatctcactgtctaaagcttgcaaagctgtctaaacatctactatttttgagtttctgatgaagtctgcttggtcctgctgtttatatagttcagataacacaaccgcagtttatttaaattaaagcagttaggttactactagtttacaaaacatccacatttcttcccctggcatagttctgacttcctgcttctaagcaggtccgtgtctgagaatcttaagagtcagttgcccagcaagttcacatccttccggccttatctctgtcccttacaggtaaacctaaactggggcaggagctgggccggggccagtacggcgtggtgtacctgtgtgacaactgggggggccacttcccttgtgccctcaagtcggttgtccctccagatgagaagcactggaatgacctagctttggagttccactacatgaggtaagttctggtctcagtcagctttgtggagaacagttcttctagagaagaaccgagaaacctcgtataaatgttgtaccaagagatacagtgtgccctgtctctccattccatgtctcacagtgttgtagccagtatttcggtgtcaggtccagaagtgtgctctcttccaggcctttactcctttccctgccgtttccccccatcctgattcttagacacatccttatatttgcctttcttctttagtcctcaaggcctgtcccctttcagattctatcattctctgtccttgttagagaggccattctctttgccctctctctgtcctgagggccatgactctgggcctggactaagcatggtcccctgtggtgacgtgctactccagggtagcacctaggtactccagcccaggcccctctgctcctcaccaggtctctgccaaagcatgagcgcttggtggatctgcacggctctgtcatcgactacagctacggcggtggctccagcgttgctgtgctgctcgtcatggagcgcctgcaccgggacctctatgcgggactgaaggtgcggggccagcgggggcccagcgcgggggcagcgggggccagtgggggccagcgggggccagcgggggcagccggcagccaggttcccaggctcctttccggcccttcctcccttcttcctgactcagagcctctgactctcagaagacgtttgtagagtaatcacacctaaaaaatgtctcagaagttgttttttggccccatttaatatctagaatattggaattcgctatttttacctattgtggtaatagtaaaaatctagactacacagagaagcagaaaagcttcctataactctactattctttctctttttttgttctctgtgaattaaaccagtttttttgtcaacagatatttattagtggttactttgtacaaggccttgtattaagcaacataagaggatatcaaaaaacatagaatttgaaaaatatatatatatatattttggccaggacttaaaaaaacattgtagtcagtgatcatttcatgaacaggtggcatttgggtttgataataccctggtgggtaaaatttgggcagatgctggaaagaagaagttataccaggggaagaaataggctagtacccaggatatgtgaaggacactatgactgtgttggagcaggtggttcatctggggaatagaggggaaacgatatgcaaagaagtgctgggaacaaattacagtagatcaaaactgttaagaattccataaaattcaaattcctttgcagacagtgagaagcaaaagatttcgaacgaaggtaaaaatgttctcagttgaatgctgagttcctctcgtctaaaacagcccccagcagggaaatagggaagtttcttttgtttgtcctctacactggagatagaaaagctaaccccagagtgtctggtaggtttcttctgacaggtgcctctttccccagtttatatggaagctttcagaagtaagacagaagaatcttcagaaatgcttgcaggagccatgagaaaccaaccaaatgaagaaaaggactctccaagtggcttcccttcttcatttcaggggagttaggctcagcaccttgaggtgcttttccataagtgggttagggaaccatgtatgggcttctggataagtgatataacattctccagaattcagaagaccctaacttggaacctggctagatgtaagatgaatgactttggcatttgaatccataaaaccaaacctggactaaccaggcctacagagcaacagaaggaaacctgcctgagagtcctggaaatgctccctctgagtctctgggaagttctagagtttattcagcttagagatgagcccatgccttcaggtgtctggttgtggctctcctggtcacctgtggggctcatccagctgcctcagtgctgcctccaggagacttgctctggcccttgcagcttgcctttccttgctttccctttgtttccctctcctgcctgccttcctcttcccttgtttttatccacttctctgcttgtgtaccctagtgtgcacagtcttctcagtacctcacagaggaactcttggttggtataagccagttgggttgaggagtcatcctcttggtgacacgtaaacccttttgtctccccaaggctgggctggccctggagacccgtttgcagatagccctagatgttgtggagggaatccgcttcctgcacagccaggggcttgtccaccgtgatgtcaaactgaaaaatgtgctggtaagtaagagctgtttccccagggtaactccctgtctctgcgtgtaagtgacctttggaaggaggtacacatacatcagggctcccctagcggctcagatagtaaagaatctgcctgcagcggaggagactcatgtctaggagaggagtcctaggtcgggaagaccccctagaggaaggaacggctattcactccagtatgcttgcctggagaattccacggacagaggagcccggctagctactctccatagggtctcaaagagtcggacacgactgagtgactcatactttcacacataaatataaatttgctcacaggaaaagactggggtgagagtagcacaattcacagcagaatagatggatggtatcttggacttgcagcttagggaagaattgcatcataggtctagcttatattgcttaaggttttttctcctaaccctggtgagaaaatttaaacttacagagaagctaaaaaagtggtatgatgaagacccacatactgctcattcagattcatattctctctcctagtgtggctgtctttgtctctgtctctctctccacctgcatatgcacacacattttttactaaactgtatgagagtaagttgcagataaaggtctgcttctagggaattccctggtggtccatggctaagactctgtgctcccaatgcaggaggcccaggttcgatccctggtcagggatcctggattcacataattgcaactaagcgttctcgtgttgcaactagagactgcacaccacaacaaagactgaagctcccaagtgctgcagccaaggctgggagcagctaaactgacttaaaataagctttgcttccaaataccttggcttgtattgcttaagggaaagagattcttcacatgattaaaatgccgttatcggggcttccttggtggctcagtggtgaagaacccgcctgccaatgcaggagacactaggggagtgggttcgatccctgagttgggaagatcccctggaggaggaaatggcaaccccctccagtattcttgcctgggaaatcccatggacagaggagcctggcaggcttcagtccatggggtcataaagagttggacaggactgatatgcagagtacattatgagaaatgctggaagaagcacaagctggagtcaagattgctgggagaaatatcagtcacctcagatatgcagatgacactacccttacggcagaaagtgaagaggaactaaaaagcctcttgatgaaagtgaaggaggagagtgaaaaagttggcttaaagctcaacattcagaattgtgttcgcagccaccgccgcaccaccatcgctctccaacgccagcgccgcctctagctcgccgagctccagccaaaggagaagggggttaagtaaggaggtctctataccatggctcgtacaaagcagactgcccgcaaatcgacctgtggttaaagcaccgagcaagcaactcgctacaaaagcctctctcaagagtgcgccctctactggaggggtgaagaaacctcatcattacaggcctggtactgtggcactccgtgaaattagacgttatcagaagtccactgaacttctgatttgcaaacttcccttccagcgtctggtgcgggaaattgctcaggacttcaaaacagatctgcgcttctagagggcagctttgcaggaggcaagtgaggcctatctggttggcctttttgaagacaccaacctatgtggtatccatgccaaacgtgtaacagttatgccaaaagacatccagctagcaagctgcatacatggagaacgtgcttaagaatccactgtgatgggaaacatttcattcttaaaaaaaaaattctcttcctgttattggtagttctgaatgttagatattttttttccatggggtcaaaaggtacctaagtatatgattgcaagtggaaaataggggacagaaatcaggtattggcagtttttccattttcatttgtgtgaatttttaatataaatgcggggacataaagcattaatgaaagtaaagattcagtgaacaagtttcagcagttcaactttataacaattataaataaacctgttaaatttttctggacaatgccagcatttggatttttttaaagcaagtaaattttgtattgactgcaactaagtggagttttgagcatttttatcatgcagtagattctgtccactcactttacttctctaactgagttgtcctacatgcaagcacatgttttcaatgttgtctgtctgctgtgctgttcctgtaagtttgctattaaaagacattaaactatataaaaaaaaaaaaaaacattcagaatatgaacatcatggcatctggtcccatcacttcatggcaaatagatggggaaacgtggaaacagtgtcagactttattttttggggctccaaagtcactacagatggtgactgcagcatgaaattaaaagatgcttactgcttggaagaaaagttatgaccaacctagatagcatattgaaaagcagagaccttactttgccaacagaggtccgtctagtcaaggctatggtttttccagtggtcatgtatggatgtgagagtgggactgtgaagaaagctgagtgccgaagaattgatgtttttgaactgtggtgttgagaagactctggagagtcccttggactgcaaggagatccaaccagtccattctaaaggagatcagccctgggtgttctttggaaggaatgatgctgaagctccagtactttggccacctcatgcgaagagttgactcattggaaaagactctgatgctgggagggattgggggctggaggagaaggggacgacagaggatgagatggctggatggcatcaccgactcaatggacgtgagtctgagcaaactccgggagttgttgatggacagggaggcctggcgtgctgcgattcatggggtcgcagagagtcggacacgactgagcaactgaactgagcacagtacagttacagttacataaagatttataacattgtgttagtttctggtattaaaatgattccattctacatatctgtattcttttatcatattcttagcaattttatgcctttacaagatactgaaaatagttccctgtgctataaacattgttgattatctgttttatatgtatagtttgtatgtgctaatcccaaactcctaatttatcgctctgccaccccgttcccctttggtagccacaaatttgctttccacgtctttgaatctgcttctgttttgtaagtgagttcatctttgtcgtgtgttagattccacacagcagtggcatcatatgctggtctttctctgtctggccgatttctctccttttggtaatctctaggtccatccatggcgctgcaaatggcatcattccattctcttttatggctgagttatattccattatatatacatacagttgcttctttattcctctgagacatagatttccttaggaaaggaaacttgagggtgtcaaagaagcgctcagctgaccaaaggacctcaaccttcttacgtatcaactttctgccctgggttctggaggtcagaggagaataatcaggaactgaaacactttccttgtgtccttcccttactcattcttccaagatttgctaagctcctgatgtgtgccaggcactatgcaatatgctggggacacaaagatgaaaagacagtccttgcgccaggttgcttgtggtctagggagaaggaggaatgggagtggatctggaggcggggaggctggaggcagagctgatgaagtgctgctctgaggtagatgcctacttttgagcttgggtatgcagttgagcactgtgtgcaggaccaggcatagggtgactgtcatcctgctttgtcggcagttggacaagcagaaccgtgccaagatcacggacttaggattctgcaagccagaggccatgatgtcaggcagcattgtggggacgccaatccatatggcccctgagcttttcacaggtaagccggagggtggggagtgggtttgggcagagctgtgtattttaaccaagtgctacccttcggactaggtgatacccacaagtactactggcagttctggtacaggcaggggagaaaccagaacaggagaaacccaagacaagtagggagaaaaaggaagaggtaaaggagcaagaaagacagttataaatgggaatccccagctatcttttggctgtctctctaggctgttagtgccataattgccatagtcaatcaattatttaatcagaaagtattgataaagtcagaaatagaaaaatatcgtatattaacacatatattacagaatctggaaaaatgatactgatgaacctatttgaagggcaggaatagagatgcagatgaagagaatggacttgtggacacagcaggggaaggagaaggtggaatgaattaagagagtttcactgacatagatacactgccatgtgtaaaatagatggctagtaggaagctgctcgggcttcccggtggctcagtggggaggaatccgcttcccaatgcagaagagtcgagtttgctccctgggtcagggagactccctgaagaaggagatggcagcccactccagtattctcgcctggagaatcgcatggagcctgacgtgttacagtccatggggtcgcaaagagtcggccaaggctgagcgacagcattaggatccggagttagttggacacactaactacagtgtactaactgtagttttacacacatcgaaaagaagtagacagtcatcatttttctttccctgactttaaaaaaattgctgttcccacttctattatttgatcttggctacttccatatttaaactcctttgattgtttctactgcagttcatcctactgttgtaaaagtaatctttctaaagtattactttcttcatgttacctcctgctctaaagcataaatgaccccttctccccaccgaatccagactatctgattttaaatatctttatgttctggttccaacctatttacccacctgtattttccaattttatttccctaatatgacctttcaggattaatctttttgacagtcccattaaaattaaaggcctgttttccttctttgtcaggttctagttttggttctcttaatctttgaccctcccagtcccgtaattgttcatactataaaatgagcattataaatgtgtcctttctaacagggttgttataagagataatggatagcaaaggcttttgataaaagtgtgaaaaggcctccactgatgcaggtgagtgtgatgctgttgattccctccctgctcactacttgtcaccctttcttgctgcagggaagtatgataattctgtggatgtctacgctttcggcattctcttctggtatatctgctcaggctctgtcaagctccctgaggcatttgagaggtgtgccagcaaagaccatctctggaacaatgtgcggagaggtaagagccacgagccctgcttcaccgactcccctggcgggagcacgctaaaaccccctgctcccgcagcacctcccgtcccctgctctggccactccacagcatgacctcatacacgtttaaaccatcgtggaatccagaaaagacatttaagtccaacctttccttccaggcagcatggttctgaattctcagaaaggctttttttctttaaaatgtctaattcttcagcttcctatgcaggtatattccagtttttcatcactgttactattaagttctaacctagataactgcagctgaagccaaagcttattgcatcgtttaacatcctgagccccaactgggtaattgatcagagctgatcatgcctctttgttgtgtcggtcccttctcgctgcctctggtcttatttcgatgctctgttctctaggggcccgtccagaacgccttcctgtgtttgatgaggagtgctggcagctgatggaagcctgttgggatggtgacccctctcagagacctctcttgggcattgtccagcctatgctccagggcatcatggaccggctatgcaagtcacattctgagaggccaaacagaggactcgatgattctacttgacagcagagacctttctctttcactcttttttttccttcccctcaccttttggctatgggaagaatttgacatttattcattacagagagctcccaaggggactgatgcttgctgggaaacttgagacgctcccaggcagagatgactcccagatagtgaagagttggcatatcccgcagtcccctgtacccaagctgtttctttagccaaaaaaaaaatcagcataaatctcttctgaatgaaatttcaagaaaagtcatccacagttcccttttccagactgtcttttagctccagctgtaatcaggactctgtgcttccattgtggagcccacattcccaacattctttgaagccttagtagttcatactcctgtttacacacgggaggttaggtttttctctgcccagagccacttttcagtttatcccctgtggcctagtttgctctcagacattagtttgctagcagatgccccatattttttgcctgagtaggaagaagcaagggaggggctaatgcttagtaaggagatgggtggttacagttcattttttaaaaagtattccaagaaaaggtgcaaaatattcctgaaagtctccatgctagccatagtccagatgtagatatttggaagtgttatttaaacactcagcaggctgagtacaggaatacatatgtataacatgtgtttatactttgcttttgtttaataacagtgtccactaattttgggttctttattccttggcaccattatttaagtgatggaatgccatgaaatgtactgtattgtatattacttgggaagacactagatattcagagaagtctggcagtacttgggctgtagagggctccacaagaccaaagtcttgaagatcttacctcctcgctttggttgtctgtgctcccacatgatgaggtgagattgtggctggggtaggaggaagggtggagagaagaattatccttactgtgttccctccttcttaccacctgaattagggaaattcacctcagcctgaaactgaccacctggccacttttaatgcgcttgaagtctggtcccttctgttgcttcagaactggctgaggaaccttcctgccaagcagtcaggagacacagcggggcctgggcctccagagtagctgccgtggccgagggagctggcagccaggttggtctgggcagacggaggggtgcacgttggggtagatttccctagacatgccctagttccctggatcctctgcagagaggggctcattgagcaaaagccattcccttctctggaaaggagggctgtgctggttcttcccagaccaaagaagtcatttgtgactcccatcagttttaaagggacagaacctaggcagcagcttatcctaattgttaacactaaaaagagtgaaagggaaggctatattactgccacagatagaaatgggggactgtacaactcagctcctacctgtcagctctccattgcatttttttttttttttttttgcatttttgcttgagctgccaaagaggtatcgagaaagtttttccctgatcggagaagtggtttggggtagcagggctgcaaagtgataactgcactgaacgacactttattttttggcttattatttagcactgagaagccaagggggttggtgattgtaatagcactttggggaatagactccccctggccttgctttggagagaaggcatgtgtggtattccatctgactagtcaggaagttcatactgcatcagagtgggataaatggccctccaagagtcccattgccaagagagtagttgctttctttgagttttcaaagcttgatttttggatttgctggatcaaataacccactttttctttaaaagaaaaaaagagggtttatccttctaaatatgagggtggggtgggttagggctagtgggtgcttaagtgggttaggtgggagtaaccttgagaaacttatatggcaaactcccttggggattttaaatagcactactgttcttaaaacggttttatttttaactttatctgctttgttaacatccagtccaactgagctgatagaaaacagactgtgtgtgaatacctgacattggaaactggtctggatagcttgttgtcttttgtctttatgtaatgtttttgtgtgtttgttttaaaggactaatgtttattattacagtgttaaataaaagtgtaatatactaaatatgtagaataaaagtgcaataacaagagaaaattactcgggcacaaactccagttcttacactctctcccctcttgtgctcccagtctctatccataatattgttacagcaggacagtgttaattgtgtatatttttaagccatgcaactatgggttaagtcttcatttagtgtaattttgaatggctggacttggttttatagagtgtgcttctgggatgcacacacaccagatgtgctgtataataaagatcacattaacattttaggtttacatctatttggcttttgttttcccttccctcgctatgtctgctggatgctccctattccattccatttccactgggctcctagaggtctttcagtttgccgtaaagattgaccgaacatgctactcttccccatggatcgctcccagtccctcggcacttgacatgaccagagggtggggcccaggaaggggaggtaggacagcagagaagggggaaaagtgcagtgatagcaatttatttttcagagcctctcctgggttcacacccttggcaccagcgtctcttcagcaggaacttggcaacattctaaactcgtgcacaagcttggctactctttattacactctgagacatttggggcatggcatacaaatacgggcctctctgcatttggaatatttgaacttctttttaggctcaagctgctcttcagatttgcttccttggcagtgcccaatggacaccatcataggcctctaccagcaag

SEQ ID NO: 164 - DNA, 101728 bp, Hippotragus leucophaeus
  source 1..101728: mol_type = genomic DNA
tccaaggtcagagccagtgggctcagatcctggaacctgagcccaggagagtgtccgcgacaggtccactccctcaaggaaccgctgaatgtaaagcattctttgacgcggccgcttctattttaaaaaggaaaggcacccggcctggctcgggcgagaacaaggcgtcagagcgcccggcagtctccgccggcagggaaggaccgcccccttttcctgcagcccgagccggcgcgccccactgcggctgcgcgggccggcgtggggcggggcgggaacgcggaaggggccgcgccgcggggacgagcaagggcggggggcggggccggccgcgggggcgagcaagagcggggcgggaacgcggaaaggtcgcgccgcacaggcgagcaagggcggggttgggggcggggacgcggaggggacgcggaagggccgcgccgcggggacgagcaagggcagggggcggggccggccgcggggacgagcaagggcggggggcggggacgcggaagggccgcgccgcggggacgagcaagggcggggggcggggccggccgggccgcggggcgtgaggtgacaggtgaggggggcggtggtggcctgagcagtggagacgcggcggcgatgctggagaccctgcgcgagcggctgctgagcgtgcagcaggatttcacctccgggtgggtacacggtgggggacggaaaggggcccgcacggccgggccggggagccggggtctcatctcgcgcccgccactcccctcacccaaccccgggcctcccatccgcgcccgggcggggacagtagccaactttccggcgtcggcccggccgcacgaagtaacttaggtcccgccgggcaggctcagacccgcgcgccggggcggggagcgggtccggaaggctgcgggcggcctaagggtcgggcgacccttccccggcagatccggcccgtccgagagtggtcgggtgagaggcgagcgcgccccctccccaacgagggccggcgaccctgcgccctctcccacgccgccgagacccctgcaggctcgggccgccaccccctccagaccgccggggcccggcgggcgttttgtccgcccccgcgcgcggaggctgagcgccttttcttccccttttgatttctctctctacctcgggttcagcgcctcaatgaagaaactctctggccagagaaacgccagaactggcgatcctgttcatgccctagtggtgacacgcacgcggacctagcggttcccgaactttgcttggaatctcctggcaaccatcccggtgcgtgcccgggtggcaaaggctaccagctacaccaggctgaggatgggggttcgaaagaccacccccgcccaggtgattccagtttggcgtagactctaacgccaggggccctgggatcttacctctatctaccacttaagccaacgcgtttctgcaagtttctctgcctcactctctgcgaccagtaaaacaacggggatgatgaagatggttctcatctcacagggttattgtgaggatgaatgaactaacgtgtaaaacgcactcacgttgcgtcactgttgttattagtgcttaattcaagttttccatttcttcccaaagggtgtcactttgataaaggatgctctgtcccctttagattacggatccgttgacgaaagctctgcctatgagggcctctccgtcatgttcttacgtttctgatgagaaagatgttagctacagttgtgtcttagtggacaaaaatgtttatatggtttgcctcttaggtgctgagtagtaacattggagaaggaaatggcaacccactccagtgttcttgcctggagaatcccagggacgggggagcccggtgggctgccgtctatggggtcgcacacgactgaagcgacttagcagcagcagcagtaacagacaggcaaatacttgagcacttacatgtaaagcatttttggtggtcttggtttggggtccttacgaatgttaattgtagatgtcctaggagtcattgattggccctgtgcttgattggttgcatgcttgattccctgtcccaccccccttttaaatttaaaaactaacttattttcagaatgtaaatttttgaaactttcgggtataatgctgcaatggtagcaggagaacagtacgtcgcagataagcccatctggtacagtcctcctgtcattacctcaagaaattcattaatgagtaacagtctatcttctgagagttacagccgctgaaactttacaggtcaggtggttgcctctgaacccattcattctttgaactttgctcgagaaggttcaactcaccttggaatatggattctgccagaccatcctgggagatctggaaaacctgagttgagggttgagttacagataagggtggaggggatctggttagaacgccttcttgaaaactgaatttacctgaagcatgacggaaactggggccagtttgggataggaaatcctgagaaggcttccattctgtgaaggcccttcatgagcttccttgtacaggtcactctgagacgacaagccactggaccagcagtgtgtgccatgagcctgtcacctggcagagaaatcactcctgctcaagatgaaattaaacacggcagtacatgtatattgcatgaaggcactgagggattcagagatgaaagcaatatggcccttgcctctcaaaaccaccagactggacctaacattcctttagaacacttgctattggtgcccatagacgccagagcagctggcttacaaaataactggaacatctaccattagggttgccctcggaactcagtaggggaaaggtgggtgcttccctgagctctttcactgtggagcttcaccttagcccagagcaacagcctgtcttcagagacttttctgctcatttttagtttctggaaattcatataactggagctgaaacataggcagtttactgtttttcaagtataataggaatattctttatcaggctcagaagagaatgccactgctactgctgctaagtcgcttcagttgtgtccaactctgtacaaccccatagatggcagcccaccaggctcccccgttcctgggattctccaggcaagaacactggagtgggttgccatttccttctccaatgcatgaaagtgaaaagtgaaagtgaagttgctcagtcgtgcccaacttcccgaccccatggactgcagcccaccaggctcctccatccatgggattttccaggcaagagtactggagtgggttgccattgcccctccgggagaatgccacattagtggttaaagcgtgtgtgaacactgaatttcaaccttccattcaaacttaggaaaaagtcagcttcaagggactgtaggttgtccatggactcaagatcttttttcatcaaatttcattcatcataatagttacatcaaagtcaaaataagcctagaaattatgttgctttccttgtgggctaactgggcggttatctggtgcaggggctgagggacagacgggactggctcccagcttcactgtctgcccctcgcctacatgcatcctcacctgggtttatgtccctcggagctctgggagccttttggagagttcacagagaacctctgctctttaaggactggcttgaactctgagggaaactttgggacacactgcagcactttcttcaaatctgctctggtctttgatttaaaaaaaaaaaaaaccttcaaaaaaaaaaaaaaccttcagagaagttatgacccacagcctgaggattgatgtattcaggcttgcaaaccccttcaggaaagtgaaaatcagatttaccaagggtttacagctgcctgtcactggctggcatttcctgtctgtaatgctctgggtgcttttggatagggaggaatagaagttcacagttgttacttgttgcaactagacagtgggtgtttccttctctctggtcagaggccccctctgccctgacctcgggccctgcctgctgtgctcatttctcttctcctctctggtagtatcgtaacctcaaaggagagcatccaacagtccagtttacagtgaggtttaatgctggctcttccttgactgagtgagtgatgttgctcaattgtgtccagctctttgcaaccccatggactatagcctaccacactcctccatccatgggattttccaggcaagagtactggagtgggttgcctttccttctccagaggttcttcccaacccagggattgaacctgggtctttcacagtgtaggcagacgctttaccgtctgagctaccagggaagtccaatcaacttccttgattacttaccttttaatataaacagggaaaaaaaccttaatattcaatttgacttattactgagttcctaccaagtgtcagacaccagtctaggaagtcaaagtcttatcatagaagtttttttcattttattttaaaaaaaagataggaggccacatgcccagttttgcctgctctttgccagtgtctgtgtgtttagccagatcctggagctacaagcttgacaaaaactgtgtctgctctccaaatgccctagcctggcgataacacaaagcaaagcagaaggaagtgaacgtggaagatacaggtgatatggattgtgagctcagaggagtcattagttgagatgcttcaaagaagagctgacttctagactggcctggaagaataaggagagatgaggctagatttggctgagggatttcagagatgaaactcttgtgggagaggaacctggaatggaagtttagtgtctgataatagagcgtcatcagtgctttgcaaattaattcatttagaaaatatttattgagcacttacctgttgatggggcttccctagtagctgacatgctattgcaatatgcctgcaatgcaggagacccaggttcagtcactgagttgggaagacctgttgcagaagacaatggctaccccctccagcattcttgcctggagaattccatggacagagggacctggtgggctggagtccatgggggtcacaaagattcagatgcaagtgagcagctaacacttaacacctgttgatgagtactagggttacagcagagaatgcacaccagacagcaaataatggccctgcccacactcgactggctgctgctgctaagttgcttcagtcgtgtccgactctgtgcgaccccatagacggcagcccatcacgctcccctgtccctgggattctccaggcaagaacactggagtgggttgccatttccttctccaatgcaggaaagtgaaaagtgaaagtgaagtcgctcagttgtgttcgactctcagcgactccatggactgcagcctcccaggctcctccatccatgggatcttccaggcaagagtactggagtggggtgccattgccttctccgactcgactggcaggaggccgaaaatctagaaggtcagtagtactcttgctgaaaacaaagcaggttcaggggttgggtggggctgggaggattgctgtcttatataggatggtcatggcttattattaggttgaataatcttctgaaggtttttgtggaggggagcagcctgagcctacttgtatttgtggaagaataatttgagaggcagggtgatgggaggactacagatgggaaacggaggttatttaggaggctgtagttatggagcagatgagagatgatgaaaaggcagtgctggtggaaatttgacagaaggaataatgacagaccctggtcgatttcattaaaaaaatgagactagcaagtgaaaaaaggtggagaaattgaggatctcaattttggagtatcttagatagtgatgtcgtttaccaacagagacgctgaggagctttgagagagaaggagcagttgacagggagtgtgtctcgaagtccaagaagcagcaggaaattcagggaacactgaggaaagaggtcaggaccgactgggtgcattctagagtgattaggatagagacagcgtacagtcctctccccttcctgagtctgtgacttttccgtgagtctctcagctgccagagctttgtggtcctgtgcacttttaggtgtgattgatgcttttgtgtttcctgattttgagttttttaaaaaaaagttaatggggaaaatataatagattggatttgtattcataaatagaatttaaattcaaaataatagaggcgtgaaaatgttataggacaaaatatgctaatacatgttgtggtgttttaaagcagtcaccctggcctttcataatagctgatgggcttagatgagtagaacattgaagtgcaaataagtggaatgccatcgaggtcccccatcccatcgagtcaggcccagaaagccatttcctgctcagcagtcattgccgagctccacctttcattctgtgaaactactttttaagctttttgtctaagaggttttgctagttatctccatttctcaagaagatgtctccatcttagtattttccgtaaagcttaaagaaaatgaatgtgctatggtcaaacaaaggtcagtctttgaaacaatctcaaaatattatagcatgatgatgaatttgaaagcaagtgtttcggactctgaagcgcacgttggttgctttcagtgggaaacaattgagaggtggctcacttcgaagtctgtgtgtgaacacactcacgcagtggcacgcctgtctctctgaggctgtgctgtgttgggaagaaggctaggaacggaggagaagccttttatgggaactggtggattgggggatctctgttttattttaccttggccctgtaatgtacatagctgctttcttgatggtgaccatttttattatacttggtgatcatttttattatactttttgtttgaattgcctctgtaatttacagttacagcctgctgccagagtcatattcggaatttcctttaattcttgtggcaaatcattatggtcagtataatacttctattttatggtttaggaaactggggaattgcactcagaccagtatttccttctcggcgtggcaagacactgtgggacttgattaatgggttgtttccagcccagaatcactgtgagaaacttaagagttctccccagataaaaatggtaagctcctgccagttgaattctgggtttggagtatgtacttcagaaaggacctttttgcttttgggaagattacttgttacattttcaacttaaaaagtgttacattgactatatttatcctttcttaacttttttcactgtttccaactttcttcttgctactttgttttctccagcagtttctattctgaatgtggcatattgatgatttacatggaaaggtatgataagaaaagatgaatgtctacaagactgttttttgttatgaaaacttaaaaaaaattttttaaatctattatttggctgtgctgggtgttactgtgcgagctcttctctagttgcggcaagcagaggctactctcaagttgcacgggcttctcattgaggtggcttctcttgtggttcctgggctctagagcataggctcagtagttgtggtgcgtggactgagttgttgaggctcccgggctctagagcgcaggctcagtagttgtggcgcatggatgtagttgtcccatagcatgtgggatctttccagaccaggaatcaaacccgtgtctccagcattggcaggcggattcttaaccactgagtcaccagggaaacccccaaacttttttttaacaatgttttaaacatttacaaaaatatatacagtgagccccatatatacattattcatataaaatagttaattattgtcacatttactcaggctctcccttatttatagagtatgagctttcctggaggctcagatggtaaagaatccacctgcagttcagaagacctggattcaatccctgggttggaaagatcccctggaggagggcatggcagcccactccagtattcttgcctggagaatcctgtggacagaggagcctggtgggctacagtccataggatctcaaagactcggacatgactgagtgactaacattgtttatagagtaaacctcagacttagttctcacctctctcataaatcaattttcatctaaaaaaaaaatacgttatataaatgcaatgccaatatcatacctaacaaaattaatactaattctatattatcaattatccagtccataatcaaatttcctggttcttaaaagtatctttttacagttgatttgttcaaatccagatcaaataagttccacacattatagttggttaaaaaccaatttttaaagcagatggctgttaaggagccacctggggaagcttacacacccttccaataattttagtttcagctccctgtaagctttctcttttctgtttcattccaaaccaattttttctttcttttggggaagtgtggaggagaaccccaaatttgatacattacaattgagaatttacagtttttttcagaaataaatgtttgaaatactaacctagagattttctcagtgttataatgaatggtccaaagatgatcttagcagtttgcttcaatatccttgttaccatatgaattgtcccaaatcactgaaaataatactgtaatgcactgctgtgtccatttgttctagtacagttctacctgaaatgtcacaaccaagtgcctttctcagattttggagtggaaatggttgaatggctgtcaaaataactttcttgagctgttgcttaatcttagtttaaactggatttactggtttccaagctaaactcgaaatttgttattgtttttctaggacaggtaagactttataaattcagcttatctggagagatgtctacacatagtttcgtattaaagagattgctaggtcttttttttaaaaaaacattgtagaggaattgatctcatcaatattttagtttttgaaaaaaagcatagaataatataaaaaaaagtcttggtgtgaaattgatactacaacttgttgaaaaatgggggccactctcttttttctgatgtttccagaatagtgaggcttctttagtccagtcatatttaggaagtgtttctagaaaagggatttggggcaagaaaaatataaaatggcatttgatactggaagtccctttctggttttgagctaggcaccatcgaccaaaaagttggacgactctgtcaggcgtacacgtacagctgtgcacagcagagggttgggcattctaggagagtcagcccgtgtgctaggacagggcgactcggctggtgcgctgggacagggcgactcagctggtgtgctgggacagcttctggcaggttgcagtagagcacgtgaggaggcagctcctgtgcccgctttaggaaggctttgtggggctagctggggtactgtggcctgtgcttcagactctgtttagaagtgaatatttgtagaagtaatcagattaagaagaacatgtccagatgtcttcattgtatgtgggaatatctcataattgagttctcactttttgactgttatatgatagagtccaagtcagaagtagggaaaaatgggctggtgaagttaaaaaaaaaaaaaatatatatatatatatatatataaaatacaaagtttatgaccttcatattttacatatagaaaagcttatttttcttacatatgcatttttagcccatttattttttccagcccaataatttaaaaaagcaaatagaaggggagtagagcgacttcactttcacttttcactttcatgcattggagaaggaaattggcaacacgctccagtgttcttgcctggagaatcctagggactgtggagcctgattggctgccgtttatggggtctcacagagtcggagatgactgaagtgagacagcagcagcagcaggcggcttcccaggtggcactagtagtaaaaaaacaaacaaaaacaaacaaacaaaaaaaacccctgcgtgccaatgcaggagacatataagatgcgggttcgatcactgggatgggaagatcctctggaggaggacacggcaacccactccagtattcttgtctggagaatcccatggacagaggagcctggcaggttacagtccatacggtcgcaaagagtcactgaaacgacttagcactcacgcaggctgctatagttgaatggctagcagaagcagtaagtagtagctgatacgatgaccagtggtagagacggaaaatttaaatttttaaaaaactgttacaggatcctgaacagactcccaaaaccactgtagattggtttcaggttggcaaatgacgaggcattcctagctcagaaacatctaaggaatgtactgttttgttatgaaatgcagtcagtggtgttcatgataatgaccctagattatcagaaaatgtgccaactcctctttaatgaaagaggtttttaatgtattttagaaactttttatcaatagctaaaattgctcagaatgttggcacttagagagtgagtgcttagtatagtatcactttaaaatgtgttggttagacaaagaaaacagacttatggacatagagggggctgggtggagttggggggagaagagggtggaacagatggagagagtagcgtggaaacatacacttcgatatgtaaaatagctagccacggggaatttgctgtatgactcggagaactcaaaccacggcctctgtaacgacctagagggctgagatggggtgggaggttggagggaggttcaggagggagaggacatgtgtatacttacggctgattcatgttgatatatagaagaaaccaacatgatactgtaaagcaatgatccttcaagtaaaaataaattttgtaaaatgtgctgcttagatagtattattactgatcaagttcacatttgctgtaaattttccacttgtgtcttatgtacagtacacaaatgtttgttgtctgtagaggtgcttaattctttcttaaaaaagtattgacttccaaccagaaattttaccagctatgaaatttgcatttgaaaatttcttaaattgtaaaaatgtgatattttatactggttgaattataggctgaagactttaagcgacaagtcaagagaagctaaagtaaaaaacaaacccaggtaagcatgtgctgttttaatttactatgacttaaatttcatacaatttttggttatagtcatgatactgtaattaatgtattttacatctgttgcatgcatctgactaaacagtttactgattctttctaaattttctaacactggaaatttctctgataaaattgtaaaatggttgaaaaagtgacaggtaattgttttactctatgacagtcaatggttatttgatcacaattaatcatttttatttgtatattaagagcaaagtaaaagttctccattattgagaagcaaattattaatgaaacagtacttggcaagtgagcctcttcagctgtgttgtctgttttatatgaaaacactagtattgtgcagtgctttgttcattttttaaaataaataatgcccactactaaatttcactttaaggctagcagggggcacttccctggtgatgcagtgattaagactccacactgacaatgcagggagcacaggttgcatccctggtgagggaactaagatcctgcatgccatttggcacagctgaaaaattttttaaaaacctagagataaggagcttaaagaaattttcttgttagctagaattccgttaaagtgtttattgtattatactgtgctaaaaatctgcagggcaaagtgatggctagtagtatgttgcagtatattaactttggaataggggctttccagtggctcactggtaaagaacccacctgccaaagcaggagaacaggtttgatccctggctcaggaagataccctggagaaggaaatggcaacccactacagtattcttgtctgggaaatcccatggacagaggagcctggtgggctacagtccatagggttgccagggagtcagacacaacttagtgactaaacaacaactttggaataatggtacgtttttctaaaagtttagatcagttgtcattaacgatttaaaaatattccacattgtgattgacagcatcaaaattattgtgtgtaactttttgtacgttggcctaaagcagcatcaatctttaataaaataagtgttttcttttggcaggactgtcccatgtttgccgaagtactctgctggactagaattacttagcaggtaagtgttttcatttaaataaaaaggttatacttctattatctaaaagtgttttataattctagagatagacaccttaaaacaactaaatttttaccttaacatagagattgtgtccctcaggagcttttccatttatttcactgattaatacaaaggccattcagattctgagcatattgatcactattatatatactaatcgataactttatcatatgcttgtattatgtttgtggtttctttgttgcaagaaaactgactctggatttgagtcctcaataattttcttgctttgattcttaattttataccatttcttctccaatccatttctgttgatgtgcaagtacatgattttcttagatgacatcaaaagcataagtgacaaagggaaaaaggatgaagtggactttatcaaaattaaaaccttttgctctttaaagaatactattaagaaagtgagagaacaatccatagaaggggagaaaatatttgcaaattatacatcttttgaggtacttgtatctagactataaataactttaataactcaacagtaaaaagacaaacaacccagtgaagaaataggcaaatgatttgaatagacatttctgtaaaatgatgggcaaatggtgaataagcgcatgaagaaattctcaacatcgttagtcacaaggggaagggcaaaccacaaccgcagtgagataccactcatacccactagcatgcctataatccagaagacaaacaacaagtgttggcaaagatgtggaggagttagaacccttatggtcttctggtgggagtgtaaaatggcacagctgctgtgaaaaacagtttgttagttttctcaaaaagttaagagtagaattaccatgtgatccagcaaattcacaccaaaagaattgaaaacttacgtttatgtcaaaatttgcacacaaatgtgcataataggagtatctttcattcaggctcccctgtccatggggattctccaggctaggatactggagtgggttccatgccctcctccaggggatcttcccaacccagggatcgaacccaggtctcccacattgcaggcgaattctttaccacctgagccatgggggaagcccagtttcattcataaagcaatatcattcataatagccaaaaagtagaaacagcacaaatattcatcaaaggatgaatgaataatttggtgtctccacacaatggaacattattcagccacaagatggaacgaagtgctgaggcacactacatcttgcacatcttgaataaaacttaaaaacattgcactaaatgcgaggattgaacaaaaaaggcacatagtatatggttctattgatatgatatgtccggaacaggcagaaggatagtgtttgccaagatttggagaagagaggggaatgagtaatgactgctaatggatatggggtttgttttcaggatgatgaaatgttttggaatcagtggtgatagttgccccaactctgtgaatatgctgtgaattatgcactctaaaaacatgaatgttatgctttaaattaaaactcagctgttaggaaaataagtgtatggtttgcacgtgttgttatctgcagttctgtatctagtgacgtggcatctgatggctaagtggtagccgtgtgtgcagtagaaggtacgctccttcgccttatctgcgtgtgtcatggcccaatcatctatgcctgcccattgctttccattttctagctttatattcagtttctttttatgcttgctgaatctgggcatttttttttttccttctctagttgcttaatttgacattaatttcctgcttgttctttgttgagtgaggaacacaagtgattttgaaaggaggtagaatacaaatcaatccgtagtatactgtttgcatgttatttttgtacttttttaatctagtgatttagttgaaacagcttcattgaaagttgcttatttcagaggtgtagacttctctgtgtggtagttttggggtagttttggggactttatctgaaaaatttacagccatatctataatgtgtctattcattgcactgaaacagtattttctctctgaaactagtgctgagtggaggagagaccattttaaatatctaaatcataaatttttttagattgttaaaatactgtgtagaatacgataacataaaattttgccatcttaaccatttttaagtgtacagctcactaatgtcaaccacattcacattgttgtacatccagtctccaagaggcttttcatcttgcaaacctctgccactggcaaccatcgttctctttttataaatttgactactttaggtaccttttgtaggtggaatcatgcactacttgtcttcttgtgattggcttatttcacttaatatattttcgagtttcagccatataggttataaacatttcctaatgtcttccagttttattgagatttaatcggcatacaccactatgtaaccttaagttattgccgcataatgatttgacttacttcatgagatgactgccacagtgaatttagtgagcattcactgtctcatatagataacaaagaaaaaaaaaagtttttcttgtgatgagaactcagaatttattctagcaacttatatatatgaaaactgctagaataaattctgagttctcatcacaagaaaaacatttttttttctttttcttttttatctatatgagatggtgaatgctcactaaattcactgtggcaaacatccctggtgggcttcccttgtggctcagatggtaaagcatctgcctacaatgtgggagacccgggttcgatccctgggtcgggaagttcccctggagaaggaaatggcaacccactccagtattcttgcctggagaatcccatgggcggaggagtctggtaggctacagtccatgaggtcacaaagagtcagacatgactgagccacttcacttcaaggcttgtatgtatctgtttgttcagggtttcagtaacaaagaagccccggctgggtggctgacaagaacaaagaacaagaacatccctggtactcttttatcttacaaactagaagtttgtaccttttcactgccttcattcaattccctgtccctccacctgtggtaaccacaaatctaatctctttttctatttgtttgcttgcttgtgtttgaagtataactgacctacaatactttgttagttcctggtacacaacatagttatttgatatttctgtacattacagtgatcaccgctgtcatcaccactaattcaaaggaagttccttccttcttaaggctgaataatatcctattgtatgaatatgccatattttgcttatagcttcatccattaacggacacaagttgctttgattttttggctgttgtgaataatgctgctatgaacatgggtgtgcaagtatctctctatgacccagctttcagttttttggtggtgtatcctcagaagaggaaatgctgaatcagatggtaattgtacgttaattttttgaagaaacaatatactgttgagcagctgcactattttatattcccctgtgtgtgttagtcgctcagtcgtgtctgactctttgccaccccatggactgcagcccgccaggctcctctgtccacaggattctcaagcaagaatactgcagtgggttgccatttccttctccaggggatcttcccaacccagggatagaatccatgtctcctgcattgcaggcagattctttactatctgagccactagggcagtgcacatttttccagttgccatttctccatattctcaccaaatcttgttttggggtttgctgaggtttttttgtttccattctcattggtgtgaagtggtgtctcatggtggttttgattcagtccatcctaaaggagatcagtcctgggtgttcattggagggactgatgttgaagctgaaacacctgatactttggccacctgatgcagagagctgactcattggaaaagaccctgatgctgggaaagattgagggcaggaggagaaggggatgactgccggggtccagccccggtggatccagggaattcgaagggtggacagagtcggcgaggaaaaaacttatttatttattaatatagaaatataagattagattaagaaacaatagtatagtaggaaaattaagtggagaaagagggctgaataacttggattatgtggaagaccaataaaattccagacaaagaacttgcaccatctacgttgggccactggtactcgcttgaacatctaagggtgcctcgccttaggctccctttcacgcgggtcttaacagccagggcaagtaagtagacttggtgagcctctgcgccccagatgggaattcagcctgaaattaaagtaaagaggaaaaggagggagagggagaaagagagacactggggaaaccagtccagcgattggctccggcccctattgtctagaaaggccttttatacctttttttgattgtacatagagatcaatgggtaatacaaaattatgcagtgttagcagcccagacttttatcaaaaccaggcttttctctctgcatacctaattgtatatatacaagtcttaggtgatttacatcatcttctggccaaaaagggccaattaacattttacagccttttttctgataagggtttgtcaaccagaagacttatttgtgttgatcttcccaaggtctggtgccactctcagaaagcactaaataaagttacattcttacatagcaaggacacaagaggagtgcagtgatatgtaacaaaagaaaagtaattaactcaaaagtctagtgttgctaacatcaaaactactatatatctttttccatatcccgtttacattgattaacatcctcccaggtgcctaaaagataaagaatatggaggcctggcagcagtcattgagtcaacagtgaaaaccctctaccaatataatttttaactctttagaaaaggctctgtatctttaagatgcttttaagttttgtgcctctcacggttggggggctgtaagcaattcacaagctgtaagaggtccggggaacctgttaggcaagctagaagctatcagaggggttttaactgaaacatccctttcaaatgcagaagactaaagctctgagttgactttttccagagaatatcagaagagtggaaaggcagagtacaaaggccggcagatttttgatttggggggtacatgctcaggaaattccagggggacccctgaagtctgatcacgtctttgcgtatgtcagcttccttcctcatgaccttgtcacgggtgggattcctcacgctggctcccggcagacgatagaggatgagatggttggatggcatcaccaacacaatgggcatgggtttgggtgaactccaggagttggtgatggacaaggagccctggcatgctgcaattaatggggtcgccaagagtagggcgcgactgaactgaacgatgatgatggtgagcttctcatgtgcttattggccatttatatatcttctttagagaaatatctattcaaggcctttgcccgtttttggatagagttctttttgttgttgtcgagtgttgggtgttttgtatatattctggatattaatcatttgtcaaatatgtgatttgtatttattttcttccattttattggttgccttttatctgttgattgtattctttgatgcacaaaagtgtctaattttgattgagtccaatttgtttgcctgtgcctttggtgttatatccaagaaatcattaccaaatctaatggcaagaagctcatgttttcttctaaaaattttatagttttggatcttatgtttggattttttgatccatttttatttaatttttgtatatggtgttaagagtccagcttcattcttttgcctatggatatgcagttttcccagcaccagcatatttgttgaaaagactatcctttccccatttaaggatcttggcacacttgtcagttatttgaccgtacatgcaagggtttatttctgggctctatttcattggcctatatgtctcccattatgccagtaccatacttttgattattgtagctttctagtatgttttgaaattaagaagtgtgtgtcttccaactttgttcttctttttaagattattttagcttttcaggatcccttgatattccctgagttttatgatgaatttatgaaaatatcctgtttctcttcatattttcacccactaattttagcatctattacagttcttgcctgaaataattcattgtgtttaccaaatggtgattttctatttttctcattttttttttctatcattatttattggattctactgtaaggaagaggttttcccgtctgccccatttatttatttggttgtttatttaaatcactataagctcatggctgttggttttcatctatgagctctaatccatttctaccattattttttctaccaaatctggtgtcccagatttggcagttagaagccccttcaagttaatgtctgtgtgtttgcagaatggctccattactttttgagcttttcctttctgagaccacaggttgtattttagataggattttttaatgtgtggcttttattttgaattattattattattatttgctttccttaggtatgaagatacatgggctgcactccacaggagggccaaggaatgtgcaagtgctggagaggtaaagaatcagctcatcttatacttacagggaaaatatacttttgcagtcttaaatgcttatttttaagaaattaaatttatagttgtgttaaaatgtttgacaggatatcttaaagtgaattttgtagttgattatgaaacaccctaaataaagcacttttttgtaatttctcagtcaggtaatttagttagcttagagagtttataacttttattctagagtcgcaagtggctctttggttcatcgaggtataatgctttgaatttgaggtctggtacctttgcattttatgtaaattatgtcatttctttctactcactatttaagaattcctttggcggggacaaagtttaactttgctcaagtctacttaaaatcattagtttgcttattagcaaataaatataaaaatctcaggagtcaaccttaatttcttagagaaacaacctattttctagctctatacagtgtgtaatgaataaaagtgacttataattaaaattacttggtatatatacttaaagcttttttagccaagatcaaatattctgctactgatgtcagtcaaactttatttctttctaaaaacacgtctgtgattctgacttttaattaatttaaactgactttaccatttacctgaattagtgaagctgtaatagttacatagaacatggtaatacacatgataaaatttaggcattagtgtttctcttagaaattactggagaaggaaatggcaacccactccagtattcttgcctggagaatcccatggacagaggagcttggtgggctagagtccacgggtcacaaagagtcggacacgactaagcgacttcactttcactttcactttagaaattacggaaaaggaagaatataggcttctgtcagtaggccgactgaatactgtgaaaagtcctgtaagtgtaaaacccttaaatgctggatagatttttttttttttaatttaaatgcagtaagcttacaaaaattaagggaagtcctaaagggccaaaacaagcaaacaaaaacagcagggaactgaaattagagtggttggaaaaaaaacatggaagcagggttcaaatagtaaaacaaatgtcttagtaagatatttattgggataggagatttttgtctatggggaactgagtctgagactcctagactcctagactctagatactcttgctgaaaggataatttaggacatttttaaaaaagaaaagaaaagctacctgttggcaaaaggaggcaataaattctttaaagcacacctggagcacctaaagaatgtactgggccgcaaagcagttctcacaagtttcatgtaaatcaagtcgtacagaatattctgtgattctggtgcaaatgaccctgaaagttggtataggaaaagaattttgaaaaatccgtatgtttgcaaattaaatgtgtatattatgcatcatttacggttcaataattactacatgcatattgtgtaaattgtcaaaaactacttaggaattttatagatgaaaaatagactgaaagtcaatgagctaatgtaacttaagaattagagaacaacaacaaaaaagaattagagaacagaataaatcatgaaggaagaatgaaagagatgataaagatgagagaaataaatgaaatagaatgcaaaaatacaatagacgctagacaaagtcacaagttcttagaagactaataaaatatggtagctatctgattatgttgattaagaaaaaaggacaaatagttttaaggattaaagaatataactgtagctatagcagaaagtgaaaagataagagtttgtgaacaactctaggacacatttgaaaacagaggcaaaatggcaaaatactagacatttttactaaagttttggttgctcagttgtgtccaactctgtgaccccatgaactgtagactgccctccaggctcctctgtccgtggaattccccaggcaagaatactagagtgggtagccattctcttcttcaggggatcctctcaacccaggaatcgaacccgggtctcctgccttgcaggcagattctttattttgtgactcataggggaagcccagaaactcttactaaaactaattctaaaagcggtacaaatcctgaatagtgttatagccactaaagaaactgttaataattaatcttttcgctaggaaagcaccaggcccaccaagttatataggagagttctatgagactttcagagaacccaccatctcaatgttagacagacttctgcagcaagtgaaacaagaggaagctgccctgcccattgcatgaggctagaataactgatcctgaacccccacaagcaaagtatgagaaagtgaaattggagtccagtcccattcgtgagtacagacacaaaaactataaacagagtagaggtatgagctctcacttaacttcagcagcctgtttctggaaatcagatgttctgtgcactctatccaggaacctacttgacacactctaaattggaaaagtcattatctgttacatatcaaccccaagccctccaccagctttcttaaatatttctgtttaaaaccagcaaaacatctctagatggtagcagtttgttaggacatcaggtgcttcagacacagccttccgcctccagacttgtgatgtgcactggttgacacccagctgcctcgtgtgcagtgctgcggcccctcagtacccgcagcgtgcagggcctgcctctccttcacgatgggctccttggcctgtcttgtgattctcatattctgacagtgttgtctgaaatttaatttgagaatcttctcacacattgttttaaaatctatatcaagcttaaatataaagttttcctatataaatatgaaccagaactttgtgtttgctttgtgaatgttggatgataacaaatagcgttctgtctgggaaacaacctgctatatatggctgtgttgacaaactaaatccagccttgcattaaaaaaaaaaaaaaaaaaaaggtttattccaggattgaaaggttgtcttgacattagaaaatcttttatatgcagttgaccatgttaacaaattaagagaaaaatatatgatcatcagatgcagaaaatacattcagtaaaattaattcagagtaaaacattttagcaagtttttaatagttggtaacttttgtcctgctgctgctgctgctaagtcgcttcagtcgtgtctgactctgtgcgaccccatagatggcagcccaccaggctcccccgtccctggaattctccaggcaagaacactggagtgggttgccatttccttctccaatgcatgaaagtgaaaagtgaaagtgaagtcgctcagtcgtgtccgactcgttgcgactccatggactgcaacctaccaggctcctccatccatgggattttccaggcaagaggactggagtgggaacttttgtccttatagctaccaaaacctgcagtatttgacttgtaatgctttgatttcatagtcaatcatcttactaaatcatcttattttgataatttgcatctgggatgggagttttgtgaagatggaagggaagaaacaaaaacataccagtcttttcagttcttcatctctttttgtagtgggtagggcttccaatatagtgttgaataaaagctgaagatcttgggttcagattttagctccatcagatttaaatgtgaaagggaaaactacattttttagaaaatagtggaaaagctaagatctcagggcagagaaaggtttctttaacaaggcataataaacaccaaccataaagtaaaatattgataatttttatcaaatcttctgttcatcaagcagtaccatgagaaagttatgcagttcacaaaacagaggactagggttcaaaaaatatgaaaaacctctgcacactaataaaaaaagggaacagtaagccattaaaaagtgcacgagaggtatgaccagacattaccctgaacaaaaagcatgagtggccagtaaatgtgaaaacatgtttaaaatcaattagaaggcaaggaaatacaaattaaaacctcagatttacactcattagattatcaagcatttaaggagccttgaattttctgtgcagacagtcattattcactgatgacagttttccctcccccagcagcatgatggggaacagctagaactagggggtgtaaatcgattggcacagtgacattagaaaaatgagctggtgtgaagtaaaaattgaaattccacaaagcttttgaaaccacagttctcctagggagatttctgtagcattgtgtccccagctttcccctgtgatgtggtatgtctcatacctccttggataacattggtatggtatcatctgttcattaagtgtgacaaatagatgagaggccttgaggtcagaggtggctaggctgggtgaggtccagctcagttgagccactcggcggtggggagggagggtgcagtgaggagctcgatacctgggacgtgttggaacctaatttgtgaaaattgcctgtgtgcaccagatttgttccagaatgtttatagcaggttttgttgaaacttcagacagtcccaaagtctccctatagggtaatttttatttatagaatcagggacttccctggtagtccagtggctggccccacgctcccagtgcagggggcctgggttccatccctgttcatggaaaatgctgcaaaaagatcaaatggtgtgcagcagtgaaaattagtgaaccattacacttccatgtatcaatatggatgaatcctacaatgttgagtgaagactgtatcctgtagaggagctttaacaaaaattgttcttttgattgtaagaagcatttcataataaaatatgttggagaaagaatttcctggaagttctgttgctgaatttattatatgggggggaatatataatattttcatagttgtatacttttttattgtaagacccctaaattatcaaaagtgccactattggattccagaaatatagttctcagattgaaaaatgaaaatttattttaaatctctctgacgttgagacatctgtaaattttttaaatgtatatgtttaataaactgttttattgtgtattttttcaggccatgctcatgtgtctttagtggtctttagtcaatgtcagtctgccagggcaaatatacttaaggataattcagtcttctttgacaacttattttatacttaactactttaaagctaattcttatttatagtcttaaaatttagagcaatgttcctttagccaacagtttgttcaatgtagctttgttgtctagactttttctacaagattttttttttttttacaagttcttgatttgtttttcccctcacttagtatgtaaataaacacgtaaattgatagtgacttaggggttggattctgagggtaacgttctaaagttagacttccagtgcattatttgcttatgctttttattgttgtgaaacacttgcttgccttcagattgaactcttttaagactcatgctttaacaacttggtgtgtcagctggttaaatcaggcatgcttcattctccttggattccagcttggatctcttctgcttttggtggggagtggactgaactgggtgtgggaatgcctagtttctgcagtaatacgttttgaccttgggcagataaacggagcctctctgtttctagttgactcacataaaatggtgtaacaccatttaccctgcttagcaaacagagttgtttgaaaatcacatgaactaagtgaaagtgaaagtcgctcagccgtgtctgactctttgcaaccacatggactcatccgtggaattctccaggccagaatactggagtgggtagtctttcccttagccaggggatcttcacaacccagggatcgaacccaggtctccctcattgcaggcagattctttaccaattgagctatcagggaagcattcccccaaaatgctgaactgtttttacaaatataaaagtttttatattgttttattaccccaaaattacccattttgaaaatcacttgggtcccagccttttctttgttctcctaacttcagtgtcttccaggacttttgggatgatttttaactttgggaacaagcccaaactgtgggtttgtcttgctacttaaacttgattttctggtgttaaatctggatttattcagaattgtttacttggaggagaaaaattggccttctcacgatggctccttccttattaagtaaagctaaagtacagtttctcagaaccttttctttcgctccttttcatttttcttccttttgtgtccctgcatacacagtccctagaagattgattaagggcgtgggcttaagtgtcagattcctgggattgaatctaggtcctgtgtggctcttgagaaactgacttgtcttcattgcacctcagtttcttcttctgtaaaatgaatgtaataatattgctctgtttacaaggttgctctgtttttaatgtaaattgcttaacacagggcctggcacatagaaaatgctcaaaatgctttactcttattacataattgttgataatgatttcggagaatccattcaacatcccattcttttaaattaaagtaatatttgaatgtattttgatagattctttttatgtacacttcttatatcctatatacagaatatgattttgaattttgtggaaggcatgaactatactgtttttaagttttaatatttatgtttcattttacttttcagtaataaatattaatatctaaaaattgtttattctagatctttcaaattattgacacaattaaccactgcaattaagatttaacaaactttttaaaagatatgtcgtaaaccaggaaaaataccttttatcatcgtcagccctgtgatacaggaaattattttttcttttattagtgtttaaaaactgaggcttagaggatttgtgagacctactccaaactaaagcacagtttgttttgtttttttcccttttttgttcaccacagtatcttcagtgcctgaaacagagccaggcaaagagcaggtgttcagtaggagcttgttggatattacagatgaatcctatgggcaggggttcttacttcaagccataattttcttactattgcatcacagagaagctgtattagccacattaacctgttagcaatgctcagtactttttaaactgctctctgggatctttataaagctggctggcacaggcatttttaagcatgcagaattgatgaccatgcccctggaggagcacttggtgtcgcctctccagctcagctgaggcttgtgagtgagacggtgtgtgttgctcctccgacgtggactgactgacaacagggagaggggtgaggtgggggtgaagtgaggaaacagggcggctttctgatctctctcttgttcttatttcagtgttgttcaatgttgtgaattcctggaatattaaaatgtagacgctaaaacagtctggcaccacatgcaaatgattttctatcttattttggtgtttttattcctcggaaaggtctttctttagtgagattcagtaaaaatcagttatatttgtgtttcaactcttgaagaatcttcatcatgggttgtgtaaattgtcccttttttatataacttaattgtgaactcttttatattaaaactttatattttacagataaagttcagatatacttccttttgtgatataatgaattttgcagtctttattgtacaaaatgcggaatcttccacacttcttattcatcactagtgatgttttcaaaaaatgacctctctatgctccttccaaatcttatggtaggccctttcccctctcaccatgttaggaccaaaacaaaactgtctgggagaaactgctgtctatcattttctttaagtcttctgggaaagaagtcagaattcttttaggctagcctagcatctcacatccctgctattaggaacctttcacttctgaatttgttagtataaatccttttctcctttttttctgaaattgttcagttgcctcagggattccttcatatacaagtaccatttatcttactttattcagtgaacgttgctgtttaaatggaaactgaatcatggtatattctaaatgcattagggaacttttctttcaaaagaagtccttttgtaaggcaaataattacccattcattatgtctggggtttgtttttgtttgttttcttttcagttgttagtggctgttttctgtttcattttttctagatttgaattgtgcaaatacatggtttacttagaaacagggtgtagttagaagtggcttctaaggtcatggctgaactttctttttcccgggttaagatgcaccaatacaacccgtaatttgaggtttttctgcactggatattaaggtggttcttttctaagaaagaaaacaccaccagtctcctcagagtattgtgttgtctgtaccccagtagaagggtttttaaagataacatgggctggctctcattacgccagtctgacctttgtgtctgcagtcccgtgggcctgaccctccccttctgtgttgcagcgggtggacagcgaggtggtcatgctctccgcgcactgggagaagaagcaagcgagcctccgggacctgcagcagcagcttcagcagcttccaggcctcatcacagacttagaatccctgacggcaagtctgagtaagttccctgtttgcctctagacgctgcttctaggaaggaaaataatttggcatgagtccaaagctttctaagaatacattaatcttattggttaacaggatttggagggaaatagttctaattaatttcatattctgattaactgatgatttgacaaaaaagcgatgatttaaaatgtggaaatgatttttaaaatacaccactacctttttctgcctccattctgctcaaaaaacatacttttgttgattcttaaagtgactcggagttgtctttctgactttaggtctctgtttaaaagtgtaaacgtaggaaatgaaaggggttatggtgcctttgttatgactaaaggctgtactctggaagttgttgcttttaatactgggtttgctcagagcttcatgtcttgaaatatgctctttttttctccttaaactgataaaatattaaacagatacaattaaatgagggtacctgtttggctaactttataccttgtggaagattatatatttattttttgtttttattgggatgaatcttgctgacatttgtttcttgagcttatattcagaaaattgacttttatgctagacagtgccacatcataatataacattgtggcttattattttctaaccaagcttaagatcttagtgaagtaagaggtaggggctacctacataggagacgaatttcttgagctaataacctgagtcttaatagctaagaaggtgtaaagctaccccatcatctcttctgtttttcaatactacatttttaaaagcaaaacagagctgatttacaaagcaagtaattaacaaagcataaaacttgtgtgtgtgaataaaatgaaccccattggtatttggaatgccgctaacgtttgtagcgcctactataggtcagagatggttaggtgccttacagacattatttacaatcctcacaagatccctgcggaagtagcttttgttatcccactttacagcttaggcaaattgggcttggaggggtggagacttgctcagggtcacacacagtaaggtgttcaggatcccagtccaggatcccagccgcagtgatgacgtactcaatggaggatgaggcatttggagtggcatctgtcagcagaccccatgacccgcattcctaaagccctggaatcagtgttctgttatttctgaaagcagggtgggggaaaagagactctgggtttaggaggcaggacctctggccttatttccctcttgtaggtgtaggaatggtccttctcaagcctttgataactgacagaaaaagcctccaagacactgggggaatattccttttagccattttctattcagcatctcttcctgtatctctttgagtctttgtttttcagtggttgtgttatttctttgcagagacatccacctatgatactatcccgctttgctttccagccaagagtaaattctgtttataaatgttatttgtttgatgccactctgctgattaaatgcatttggcctcagtctaattattctcatagttaattctacttaagatagaatatagtgtattttccttctcaattaggattctactgtcctgaagaagtaatgtttagtgatgtgataccgtcttcagaaactgtgttttgactttttaaatgaatgtgatgggtttcccaaatgctcacttgagttctgtctttactaatctgagaacatcgaccaccaaaggcaaattaaagctaaattaaagcaaattaaattaaagcagaagtatcagtctcgacaatcacttccaaataatttaattcttatttttcattgaagtatagttgacctgcaatattatagtagtttcaggtatacaacgtagtgtacacttatgtacacggtgtgtacattgtgtcttatagtgattgaccccagttcaattcctgggtcgggaagatcctctggagaagggataggctacccactccagtattctggggcttccctggtggctcagctggtaaagaatccgcctgcagtgctggagacctggattcaatccctgggttgggaggatcccctggagaagggaaaggctacccactccagcattctggcctggagaattccatggactgtctatcccacagtgttgcaaagagtccgacacgactgagcaactttcccttttttcaccctttatatacattatgaattgatcaccattttaagtctagtagccatctgccaccatacacaggtactctaatattagtggcattcctcttgctgtaaattacgccccatgagctgctctgtaattgggagtttgtgcctcttagcctcctcagccacttcacccagctgccccactgccctcccctctggcgaccaccgctttgttctctgtgcctgtgagtctttttctgttttggtcattcacttgttccattctttagatttcacatacaaatgcagtcataggtatttgtctttctcagttactccacataacatatcaccccctaggtctctccatgttgctgtgaacggcatcatttcattttgtgtgtgtggctgagtaatactccgttgtatgtgtaccacatctcctttatctgttcctttgttgagggccgtttcagtttccttgcgtattttgactgttgtaactaaaatgctgccgtgatcatggcgggggcacgtgtatctttcctcatgagtgttttcattttctgcagataaataccaaggagcagagtagctggatcatacggtagctctacttttgatttttaaaggaacttccatattgttctccatagtgggggctattccaaattacattcccaccaacagtgcccgagggctccccttgccagcacttgttgtctcttagtaataaccattctgacgggtgtgaggtgaccctatggttttgatttgcatttccctgatgattagccatgttgagcatctcttcatgtatctgtttttcaggtccttgggcaaatgtttattcaggtcctttgcctatttttttaaatcagattgtttgttttgtttgtttgttttgtttttgagttgtgtgagttctttacttattttgtatataaactccttatcatatatatcatctgaagtatcttttcccattcaggaggttgcccgtttcattttgttgatggttttctttgctgtacaaatatctttatagtttgatctagacccatttgtttatttctgctgttgccattgcctgaggaaaacatttggaagccaaatttgctggcttgtataaatacatgtctatattattaatatatgtcatgaattcattttaatgagattatgccccattcttagaaatttgaatcatttggttttaatgcttgcccataaactgtggatttcttattttggaggtgaagtgaaagtcactcagtcgtgtctgactctttgcgaccccatggactatacagttcatgaaattctccaggccaacatacagagtgggtagcctttcccttctccaggggatcttcccaacccaaggatggaacccaggtctcccgcgttgtgggcagattctttaccagctgacccaccagggaagcccaagaatactggagtgggtagcctatcccttctccagcgatcttcctgactcgggattcaacctgtggtctcctgtattgcaggcagattctttaccagctgacccaccagggaagccctgatagctccccttttgcggggcagcctcagaatgctcgttgtcattatctaattactttgatatagtattacaaggtttagtcgagcaataatgaaaaataaaaattacttagaagaaaatagtaactaatctatatgtagtcacaggattctcttaacttcgctgaactttttaccctttctctgtcaaatctaataccatatccattcagtccctgtatttcctaggccacttaactcttttagtcttgccttgctctctagagggtctgcccttattaaagaataagggattaatatgatgtgagcaatttgaacctttgatgatgcttttagctgtgttaccctgtggcttaataaatatggctcctgattacatgctccctcaggaattaagtaagaacagataatccactcatgttgtttttttaatgggatgtgatccatccaacttgcaaagccagtgtaatagataatcactggtgaggcttgtcatttgaaaaaaaagagataataaataaaggtatgctgggaattgggaaagaagggctgtgaactgactttcagatctgggtttggaccgcagttccccagcttcctaactgtgagactccatgcaggtttcctgacttctctaagctttagtttctttgcttttaggattaaagatgagagaacctgcttcacagggtagctggagggcccgtagtgaggggagggtgcctggtacgtgataggcgtctgtgggtcccatgcaccatttgtgggctgaggggacacagcagtggacaagaccaggcagctgccgccaggatgctcactttctcctgggagtctctctggcctttgcagatttacaaaaccattgactttgacaggaggatttggatggatgttacacaatttagcttgtcctacactggaaaaggtcagttttcattccaatcccaaagaaaggcaatgccaaagaatgctcaaactaccgcacaattgcactcatctcacacgctagtaaggtaatgctcaaaattctccaagccaggcttcagcaatatgtgaatcatgaacttcctgatgttcaagctggttttagaaaaggcagaggaaccagagatcaaattgccaacatctgctggatcatggaaaaagcaagagagttccagaaaaacatctatttctgctttattgactttgccaaagcctttgactgtgtggatcacaataaactgtggaaaattctgaaagagatgggaataccagaccacctgacctgcctcttgagaaacctatatgcaggtcaggaagcaacagttagaactggacatggaacaacagactggttccaaataggaaaaggagtacgtcaaggctgtatattgtcaccctgcttatttaacttctatgcagagtacatcatgagaaacgctgggctggaagaagcacaagctggaatcaagattgctgggagaaatctcaataacctcagatatgcagatgacaccacccttatggcaaaaagtgaagaggaactaaaaagcctcttgatgaaagtgaaagaggagagtgaaaaagttggcttaaagctcaacattcagaaaatgaagatcatggcatctggtcccatcacttcatggggaatagatggggaaacagtggaaacagtgtcagactttattttgggggctctaaaatcactgcagatggtgattgcagccatgaaattaaaagatgcttactccttggaaggaaagttatgaccaaccttgatagcatattcaaaagcagaaacattactttgccaacaaaggtccatctagtcaaggctatggtttttttagtggtcatgtatggatgtgagatttgttctgtgaagaaagctgagtgctgaagaattgatgcttttgaactgtggtgttggagaagactcttgagagtccctcggactgcaaggagatccaaccagtccatcctaaaggagaccagtcctgggtgttcattggaaagactgatgctgaggctgaaattctgatactttggccacctcatgcaaagagttgactcgttggaaaagaccctgatgctgggagggattgggggccaggaggagaaggggatgacagaggatgagatgactggatggcatcactgacttgatgcacatgaatttgagtgaactctgggagttgatgctggacagggaggcctggcatgctgcagttcatggggtcgcaaagattcggacactactgagcagctgaactgaactgaacacagtagttaagagtgcaaaaccctggtgtgaaatgtgagaagaacagtgtagtattctgtatattgaaaaatagtgtgtaaggatagaatggaatattgtcctccagattctgtacgctttcttggtttagcgctaagtcatgtccgactcttgcgaccctgtggactgtagcccgccagtctcctctgtccatggaatttcccaggcaagaatactggagtgggttgccatttcctcctccaggggatcttccaggtttgatccctgggtctcctgcactgcagacgctctcctgtgttgctggtggattctgtactgactgacccaccaacactttcttgttgttcagctgcacgatgtactctgcatgtaagttaaacaagcagggtgacaacagacagccttgacgtactcctttcccagttttgaaccagtccattgttccatattgggttctaactgttgtttcttgacctgaatacaggtttctcaggaggcaggtaaggtgatctggtattcccacctctttaagaatttccccatttgttgtgatccacacagtcaagggctttagtatagtcaatgaagtagagatagatgtgcttctggaattctcttactttttctgtgatccaatggatgttggcaatttgatctctggttcctctgcctttttaaaaatccagcttgtacatctggaagtttttggttcacgtactgttgaagcctaggttgaaggattttgagcattactttgctagcctgtgaaatgagtgcaactgtacagtagttagaacattctttggcattgcgcttctttggggttagaatgaaaactgaccttttctagtcctcgggccactgttgagttttccaaatttgctgggatcttgagtgcagcacttttacagaatcaccttttaggatatgaaatagttcaactggaattccatcacacgcactagctttgttcatagtaatgcttcctaatgcctacttaacttcacattccaggatgtctggctctaggtgagtgacaacaccattgtggttatccgagtcactaattggactgactgtgactcagatcatgagctcctattgcaaaattcagacttaaactgaagaaagtatggcctagtggttttccctacaacacttgttctgtgcattttgctgtgaaactggtaagatgtttggaacatatttagtgaattctcctgaacttccactagagggtagtctaatcctattcctattttaaaagtctaacctgtcaagagcttttctgaattctgttgtttagtttattttgtatgagctacttaaaaagacaccttcatctagaacagaagattctgttaattcttagataacacagttctgtaagagaatgacagccttgtactgagcttgcttgcctcttcctttcaatctgacctgaccagatacattaccgttctgctttctctgtacagaatttgagagtgcatctagctaggagactgtcacagtttttacggtttcatgaaacagattatattatggtccaggttacgttctgagattagacccttcaaggggcatattagctctctttcgacacggtttagtatatactgcacagatctcatttgttccatgatggatttttaatgcactcttcaaagttccttgttaccacaccatcattaccctatcacatgaagagtgacaaaagcattagaagactcttgtggtcgtttagtacctggcctcctgtgacccatgggtttgcaaagatttctttgttccctgaggctaattatttttgctagaaaatactcattaaatgtgaagttatgaattttaatgtgctgctccactcttcatatgtcagtggtcacgctacacgtagtatgcatctgaaaatggcacaaaggaaaattccagacagcacggctcttcctctggggcggtctccacacgagggcctgtgatgctctttcctgcacagctgtcaggctctcccagatggcccttcccagtaagatccacccatcctccccaccgatcgctaactgagacatatactgttgttatagtgagcaagatggtgaggctggaacttcttgtgaaggtacttttgtgtctgtggaggcctgctagtgtcttatgcacacgcattctaagtctagttaccagatttactcaaatctgcgactgtttcctagcagatgagccaggtgtgacggggagattaaatctccgcctgtttaaattcaatataaaatattcagagtacataccatatatatgtttattattcaaacagatttttgtaaagtttttcatacaaaaagggaagaaaattcatgttcatcggtacagttcttatgtattttattactgacctccagcctgattagagttaaaatggagaagttccatggctgcttctgctttaactcactggggcctaacttgatatactgataacagtgttttcaaagttctctgcccatgtttaatttgctcattgacaaaatttagcataacctcctcatatgtaaattagatgaatatgaatcatagatttgctttctttgttattatttttttgttttaaagtgatagaaccattgtatctccagaaatccttcttaattgaattcagcagacgaggtgttttgttgttgttcaggcactaatttgtgtccaactctttgtgacccaacgggctgcaagcatgtcaggcttccttgtccttcaccatctcctgagtttgctcagactcatgtccattgagttgatgatggtatccaaccatctcatcctctttcacccccttctgctgccttcaattttcccagcatcagagtcttttccagtgagtcagctctttgcatcaggtgaccaaagtatagagctggagcttcagcttcatcatcagtccttccagtgaatattcaggattgatttccattaggactgactggttggatctccttgcagccaagagactctcaagagtcttctccaacaccacagttcaaaaacacagttctgcggtgctcagccttcattctagtccaactctcacatccgtacatgactactgaaaagaccataactttggctagatggacctttttttggcaaagtaacgtctctgcttttaaatatactgtctagatttgttctggcttttcttccaaggagcaaacatcttttaatttcgtggctgcagtcaccgtctgcagtgactttggagcccaagaaaatgaaatctgtcactgcttccactttgtccccatctatttgccatgaagtgatgggactggatgttgcaaagatatagtctttatccttaaggtatttacagaatgctgagaaatataagagtgcaaaacagtggtataatgtcagagtatgagtcctgggcaggggtcataggtcaatggaagcacagatgagggggagagagctctgatatgaacctgccagggaggtgtggagttggggggggggggaagcaaagactcctcaggacaggcaggcacaggcgggaccctccttggagtgatgagtggtcgtgaaggagggtggtggtgaggctagaaaagtagtctctgagcagggagtgagagctccctgaatgctcgggcagggagttaaactgtaagtcctcaggagcctttgaaacttctaaaggggagaactgggagttgggcaggagccataacgtgaccccggactctcccaagcactttaagtctcaggttgccgtccagctccagcacacactgctggcctatacgtcaaagcctctctgttacccagccccctgtatgctgaggataacatgcgtgatgctaaaggaaccaagtagcttagagctaaatggattccgtattaaatgtaattattccagttcttatcactaatcaaagtgaaatagcctttaaataatcctgttagctatgatcgtcttgtaagaccctgtcaaactagttctaacagagtgagctgaacactcctcctttagggccagtagcatgagctcccaggctgagctcccactcgtttttccatttaataacaagaaataatctgtacagcagctgatacattaacaccattttcctgttttcctttccaaatatatactcctcaggtaccactgatgacatttctgaaaatcttaggtgtaatttttcattgattaaaacttagatttttgctaactgtttcaggttagtctttccatagtcacagatagtagctgttgtatgcaacccctgaagatagattcaaaactgttatcaactgcattatcagtcttttccagacttacactgatctacagtgatgtatcaattatgataagtcattacctaaaatgttcttgaagaggagtgctagactacttaccacgttttaactttttagtaaaatttaatttttcctcctaaatccatatctttttaagccctaaaccctaccaagtacaaaagcacagatatttagtagagttaaaatttaggatattaaaaaatgtggggagttccctagtagtccagtgattaagactctgcctcccagtgcagggggtgcgggtttgatctttgtttggggaaccgggtggagggaacttcactttcccccaagtttaagggctttctttgtggctcagctggtaaggaatcaacctgcagtgcaggagacctgggttgggaggatcccctggagaagggaaaggctcccactccagtatcctggcctggagaattccatggactgtatagtcggacacgactgagtgattctcagtggggaactgaggtcccacgtgccataccatgtggctaaaaaatttttcttttaatgtgtatgtttctggatttaatatctgtgggtcaaacaattcatttaaaacaggcaaaatttgcatcttagtaaacctaaaactgcaagttgaaattctggaaaagaaaaagtgaaagtgttggtcgctcggtcatgtctgactctctgcgatcccatggaccgtagcccactaggctcctctctccatggaattcaaaacttgctccttatgttggtgctacggaaactaacttagaaagtcacatggtagtctggcggctaagggaaggaattaggcccagcgcccttgaatcttagctgtttgatggaactgaggctgtaaagcagcacagccagcttgctgccccgccccgacccccatgacgcacattcttgctgagtcgcacactcacccgtctgtggtggatgcctctcctttggtgttcacaggccctcaccctctctcaggctgtgttgtctctgaaaaatgcctccctgccactttgagctctctgagcacacagtttctctttttcatctttgtgtcccagtgtctgggacatgtggtgagtgcctggtagacggccatgatgctgtctgaggtctaaaagctttgacccctgaaacttttctgttgtctaagaaaacaaccggtcctcacccttgcagccgtgaaatcttggtttacttaagcacctatcaactggaaatcattgtgtgaaagagagactcagttttgatccctgactgctcatcactagctaggtgaccttgggcagggcactgaaataatctctgcaggctgtgacttcagtgttttaaatgaaggatttgacagagaggatctccgtctgccgagttctgtggcctagaggcaatgtggagtggttgaaagaccagtggacagtgagcgatgcttcctgagtgtgtgttcagtgccttggagatttatgtatatcatgttcaaggcaaaacaatgcaaaagtaacttgaaatctcaaatattaaattatgtttggcgtaatttgtgttaattatattttgatatattcttattatttggaaattgattattcatgtgtggtatatgcgatcattaagatatcaacatcagattaatcaagatactctgtttccctatcctggttaacgatgtgtaaactattttgggaagttgtgtcttaaaaatgtttgagatataaaaatatactcaaaaataatttgaaatatattttaatgttggtacattttatttcgcttcaagaaagtttaataaaaattttaaataaatgcaaaataatctcaacaattcaaacttttaacttttagacactttttcttttctccatgatcaagggttctgatttttgacgtttatttccttttttgaccttgtatactttcagctcatttagaggctagttttgaggaggtagaaaaccacctgctgaatctggaggatttatgtggacagtgtgaattagagagacacaaacatatgcagtctcaacaactggaaaattacaagaaaaataagaggtgagtttggggaattggccccgatattcatgtgcaatctcaaagtttcccacagtaccttacatgccagtctttataagtttggagtgataaaagacaggggtttcaggtgaagctctttaataagctttccaaaacatgttttgcttggtttggttttgttttgttggtatcactacctgttgccgttttatggagatgagttctgaaaagctgagcatgggataaacggtggagggagcagtgcaacagacagaacatcccgagagaggagaacccctgacctcgggtcctccgagcggcagatcctgggtggccctttccctttgcttccttttcttgtctttcctgtagagcaggaggataaggaacctgagtggtggctgtggaaaggggctcagctttgtcacttactgtctgtgagacctttgggaagttatcgaatctcttagcctcaacgtgtgtagctcgcagtgatgatgacagtgtccctgccgcctggattgtggtgaggcggcccttaccagacgcggtgtgtgctcaacgtgtgtagcttagatgacagtgtccctgctgcctggattgtggtgaggcggcccttaccagacgcggtgtgtgctcaacgtgtgtagcttagatgacagtgtccctgccgcctggattgtggtgaggcggcccttaccagacgcggtgtgtgctcaatgtgtgtaacttagatgacagtgtccctgccgcctggactgtggtgaggagtccgtgaggcggcccttaccacacgcggtgtgtgctcaacgtgtgtagcttagatgacagtgtccccgccgcctggattgtggtgaggagtccgtgaggcggccctaaccagacacgctgtgtgccctgccacagcggttatcgtggccactgttttcactgggtgaaccagagctggagatgggcaataagatttggaacactgaaattttatttgtcgttcttcactctcacccagtgacttagatatattagatatagtagtacattatagtttatatgttacaaaatgaaaagtgtttggagaacagcctaatctgtaatttaagtaaaagccagagtgtactgggcaagtcttaacatgtgttacgtaacggaaatatcattttaggtctggggtggtgtcatagaaagagagcactattgatagagtcagaagaccccagtcctggctccatctgctactgattccgtgctcttgggcaagccattcgctttcctctatcctgttgtaaaacttttcttgactagcatttggaagacttcttaaaagattacatcgttcgttaggcctctttctgatgcctcccagaaccctggccatcaaacttgtctcccctgggcagaaaactggagaagtcatctgagaagctgaccagcctgtgagaaaggagctgcggggatgggcgctggggtgtctctgatgaaagagctgggtctgcaccctagtgcccctggcgatgggccccacccctctctacgtgcttctcatcagcctggtggtgcctcactcttgagtatgaatgcacagctaaggagtaatacccaactgaagaaaggttccaaaatgaacagggccaaaataaattaaaaatagtaattgtttttaaagacccacagaggaatgagacactatgatgggagcagaagaaaacctaagaacaaaaactaactaataacctcaggtgtgtcttacaggaggccgttttgcatttatgaggcccgaggaggatgctctagagaggggattattagagaacaagaaagctcttgggcatcaaagacatggttgcagaagcagaaggctttaagcgaagcattaaaaggcaacgttaggacttccccggtggtacaatggatgagaatccacctgtcagtggaggggacacgcgtttaatccctggtacaggaagattccacatgccatggagcaactaagcccgtgtcacaactactgagcccacactctagaactggggagtcccactgctgaagcctagagcctgagccaccctggtgagaagcctgcatcctgaagcgaagcgtggtccccttctcacgacaactagagaaaacctgcaccccgccgtgaagacccagtgcagtcaagaataattttaaaaataaagttgttttaaaagaacaaaagataatgttaaacctttacatgcgagaacaaaaagaccgagaatgcttagaaaattagttaatttttaagttctttatactaggagcttgagaaagaaagggaagagaaaaagaggagacaaattcactaaagaagtaatacaagaaaattgttcagaactgaaggatatgactgagttggaaagggtccaccaaggacataatgagtagggagagagccatcttcagtatgtacttttgtacatttcactacagtcagagtaaaaaatcacgaaagccttcataaaggtcctaaggaactgcaacttttcagcagcaaccctataagtagaaaatgatttttactgtatatttacttaccctggttcaattcctggatcaggaagatccgctggagaagggataggctacccactccagtattcttgggcttcccttgtggctcagcaggtaaagaatccgcttgcaaggggagagacctgggtttgattcctgtgttgggaagatcctctggagaagggaacggctacccactccagtattctggcctggagaattccatggatggactgtatagtccatgggatcgcaaggagctggatatgactgagcaactttccctttcactttatttacttagctaaagtttcacccagtgtgaagaaatagtaacttccaggcatacaagggctccagtttagctcatgtgcagactttatcaggaagtggctggagggtatgctctacaaacgagggaataaaccagtaagaaggaagacagagtgtggaagagagatgagctgctcttagcacatctgtccagttcaggagagaaacagaattcctaggatgatggtgaagaaaagcttcagcaggtctggggagcagcccagatggaagcaggaagagcccccagaggattccaggagcaatgttttccaggggagactgtctagtgtgcttgagcatgttgaactgggtttatgagctctgattggagagtttgattatgtattagtgataggactgttttctaaaaaactaagcaaataaggtgactattaacactaagaaaatgcagttttacaagaaaataaataatacatggctcagttatagattatatatatatattctgataataattaaatgtggcatatggattcaagccagaattgtaggttattgggaagatgcagtggaggcgtgtttgtgtggagggatgggaggggtttaaggaagctagtcctcagctgccacagcagaaaatcagtaagcaatatttaaaatgggaaaaaatgaataaatatcagtgttgacatgttatttagaaaaaatgacggtaaatactggaagaactgactgtagctgctttcaaaaaagcaggacagggacttcccttgtagtccagtggttaagagtctgctcttccagtgcagggggcatgagtttgatccctggtctgggaactaacagagaaggcaatggcaccccactccagtactcttgcctggaaaatcccatggatggaggagcctggtaggctgtagtccatggggtcactaagagttggacacgactgagcgacttcactttcacttttcactttcatgcattggagaaggaagtggcaacccactccagtgttcttgcctggagaatcccagggacaggggagcctggtgggctgccgtctctggggtcgcacagagttggacacgactgaagcgacttagaagcagcagcagcagctgggaactaagaccttgcatgctgcctgatgtggtttaaaaaaaaaaaaaagggacagaaagatggggagcactgagtgaggcactaatctgcttcatcatgaatccttgtgggtactatttgacttaaggaatatacgtgtactattttgataaacataatttttttgttttttgttagctgcagcacttcctgatgtattttgcagaaacagaggactgaaaagatagcctctgataaaacagtccatgatcaaataagttccagaaacactttaccctgaatttgcctcatttaacttttaatttgcctcattatagtacatgtacatatagtaatgtattacacatggtacatgtcagtgtattaagggttctgagaattcttatgatagagaaataggtttgactcatcgcttcacaacttacctgcttacagaaccagtttgtgtataatgtatattaaaattctgtgagttggtatcctatagtataccattgaaaaaattttccaaaaccccaaattaaacatctgtggtccacaagagaagagtctcttagaaataaacctccttcctctttacaagcagccctacaaactaaactagtgatttttcttttctggctctggaggagataacatgtaatataagggttggctatatgatgtgagggcattacagtgttcgcccactacatagcttcccagaaaatctggatcgaacacctcgatgaggctggagagagcaggggacggaaaagtaaggtccccttcgcctccagcgctggtcgtgtccatagtgcactgtttcatcccgctcctgtcggggactgggactgggcgcgcagcagctgtgggagttgggacagagggtgaattattagtacatgaactcgtgtaaccgcctaggggccaaggttagggccaggtccgtttctgactgttgcgttggaacagacgggatccatcccaggtgctagtgcatctgtagttgagagtggagatatgctatttcatcatgcatttgataagcattctcggcacagacgataaattcctgccccctgtgaaaggaggaacgtgacccatcccaacagttatgagggttacatggcagattctcagtgtgggccgagggaaagagctttagaaccctcctggggtgcatccacccttgaaaaatatttgaataggtggtttaccctaagtggacttccctggtggctcagtggtaaagaatctgcccacagtgcatgagacacagcaggaaatatgggttcagtcctgggttaggaagatcccctggagaaggaaatggctgccactctggtgttctcacctggagaatcccatggacagaggagcctggggggctacagttcatggtgtcacgaaagagtcggacatggctgagcacgcgcctgcattgccctaagtgtttctgcatggaaggaggacatcctgctttaggtgactgtctaatgaacatgacatataagcgactgtatagttgtgggggggaagtacccataaatagcttttgtaataactcttctgtatataaagtgatattagtatgactgatgcttttatgggcaggaatagacaccaccttgatcagtagtaaaacatcagagagtggataaaccatggctgtagggagagacaagtactggtaccagtagtagttgggtcgtcaaatggttcagaagacgagttaaccattacaagtgtaactgctggatgccttgtgtaggttttcctaaccaataggaaatatatttttcatcaagtaagaagcattaatattgactatatgagccaaaataaagaacataagaccatttccatgggtttgtctaagctagcagtgagagaaatggacttgagatgtggaagtcagcttgcatttgacttcccaggtagctcagatggtaaagaatctgcctgtaatgcaggagacctgggttcgatctcctggagaagagaatgactacccactccagtattcttgcctagagaattctgtggacagaggagcctagtgagctacagtccatggagttgcaaagagttggacatgactgagcgagtaacatttgcattcgtagtcacggatgtagggggagatagatggtaaatgtgcacatgattttttaaaaaggataatttcagacaattgtatcgaagaaaataaagcagggttatgtgacaacggtagggaggaagggcccttcctggaggtcacatgaggactgaggcctgagtaaggaggcaagcgcatggggatggagtggacaccctcccctgcagaggggcagcaggtaaggttaggagagtgaagaagagacgctaaatcttttcagtaccaccataatattccttagaatgattgttgagattctttcataataattacattaaaatcatacataagctagtgatctaattaaaatattttttacttccagagttctagaccctttgttttccccttcagtttgtagcataccgtcagaatttctctgaaaatagctgcatcttaaaaaacagtgtgattttagtaagttagcttaattataaatgactcataattttaacacagccttccattggacttgaaatctgctgtggggcatactgaactctacaagcatttttcactaattcatttaggctttgaaacttaattgtcatcccttataaactgtctcttgtgagtggggggcatggcttcggttgatatgatttagcatccaggcatattctgaaaaagtcattgttccttttgctttatgtattacagctaaagctaaggaactatgctctttgtgtttgtgttgttgtggctgttgatgtggactgtagactaatttttgttgctgctgttttttagtccctcagtcctgtctgactctttgcaaccccatggactgcagcacatcaggctttcctgtccttcaccatcatctggagcttactcaaactcatgtccattgagttggtgatgctatccaaccttctcatcttctgtcattcccttctcctcttgctttcaatcttccccagcatcagggttttttccaatgagttggctcttggcatcagatggccaaagtatggaagcttcagcatcagtcctttcaatgaatattcagggtttatttcctttaggattgactggtttgatctcctcagcccaaggaactctcaagagtcttctctaacaccacagtttaaatgcatcagttcttcagcgctcagccttctttatgatccagctctcacattcatacatgactgttgggaaaaccatagctttgactagctggactattgtcagcaaagtaatgtctctgctttttaaaatgctgtataggtttgtcagcttctcttccaaggaacaagtgtcttttaatttcatggctgcagtcatcatctgcagagattttggagcccaagaaaattaagtctgtcactgtttccattgtttccccatctatttgccatgaagtgatgggactggatgccatgatcttagttttttgaatgttgagtttttaagccagctttttcactttcctctttcactttcctcaagaggctctttatttatttatttatttattttttttaagaggcttagttcctcttcactttctgccataagggtggtgtcatctgcatatctgaggttatgcagactaagtttagaaaagaggctctttcattcctctttgctttctgccatacgggtggtgtcatctgcacatctgaaattatgcagactaagtttagaaaaatctttaaggcaaagaaggatagatttgagatgttaatggcatgtctttagtagtagttgaccagcttaaattctagagaataacccaccaaactcctgagcgtcaagaaatgactgtccaccagacaggttgtgatcatgggtatgcctgttcttccattacagagagttgaggggattgtgctgggcagacttgccacaggcctggctttgctgagaataggacaaggaggaaccagtggcattctccaaggtgaaggtgactggaaccagaagaggaggtctggtggagacgggcaggaaggcagtaactaactagcccctgaggttctgtgtggagggtggtttgggtgctgaatgggaaatagatgagcagagtgtcccctcaggcagtgcttttatgtaaagggtcctccccaggtggaagaacatggaaccagactgactctcccccgacccagccaaaaccagacacaataagtgaaataacactcattgggacactttacgttgggcagagaggagatgtgatccttgatcagtaggagacaagccctgtggtggctccagcattctgccaggagtttccaggctgcatgcaggaaggaaaaccagatagagtctggcagaccctctgagttgaagagtggagctgagtgtctggaaccccaagactgctggagtttacagggctcagaaccagagagcaggaataccaagaatctgcagagggctccccggaaagttcagcaggggaccggtcattcatatgagcgaacgacccagggaggaggagaaggaggggactagcacccagtaggattagtgagcagtgcccatcagccagagactgagaattcctggggaaattcctcgggaaagcttccttcaacagttagcccttgactgagccccgttccagacctgcttaactaatcataaaagcaagcatcaaagagatcaagctgtttccaaataaattaaccatatcccagcaaaaatgtttctagaactacaaaaatagctagtagtcaacaaggtagatcattctaacaggttgcttgtgaatggacaagatgcatgacacaccaaagttcaactgaggttgccagagaaagatggtctacaggttgtgtcatattaagacttctatggagaccaaatccatgatgcactttaaatatttaacctgtatttctcttcttaacactttaggtaactatgcccattgacaaatcagtccttatttacgtggcctcttgaagctgtctctaacactcgcatcctaagttttcttctctactgccattgtagatgctgtagttcagttattctcttgggttctgttattggttattgcttcctctcattctgcataataaagatgtcttattctgtatgtaccccctccgcaggatctgtgtaaggagcaaatgacaacagggcttctaaaagttttgagaaaattacctcaagcacgtgggccagctcttctcgcccttgagagtaaaagtctctcagtcgtgtccaactctttgtgaccccatggactgtacagtccatggaattctccaggccagaatactccagtgggtagcctttcccttctccagagatcttcccaacccagggatcgaacccagatcttctgcattgtgggtggattctttaccatctgagtgacaagggaagcccaagaactttatccaacttctcagccacaaactcaccaagccaggaagggtatacatcttcaggactgcagaatgcttaaacaaaagattagataagagtggatagtagctggtctttcaggagagaaatctttaagatctttcctagccatcagtcataacaaagggacactcttctactgtgtttaatgcaaaaagtattgctggtcaaaaaaaaaaaaaaaatgcccctaaatattttcagatgtggaaaataagagttgatcttgcaccttacattttgaatggtattttgccatctagaatcattgtgttaggtttttaacatgggtttgtcctgggggaagcagtttagtgtttaaagaaagtacgcttccatctctgagatgactgtgtttatggagacatttatccagggctccagtctgttaagtgtgcatctgtgggtctgatttagttgacttctatacatgcatggatttaatatacttcttgcaacattccatggatttatttgttaatatgatgctttttttgtttttattctgccctcataactcaacccctgtggataaaatgataaaatagcatcttcaccctttggaaatattattagattttgagtctagtgttatttgttgaatgttttagtttcagggtttgtcatgctaaattttgtgataggatttgctgaactgagtaaaatttaaaatatagtaaaaacctaaaaggaggtatttcaattcttcctacttaattgatcttctgaaaatattattaaactttggaaatgaagagactcagagttttgaaattgcaagaggcaaacaagttgttatatcagatgaattactgcatggccaaccttttattttttaataaagaataaaatcctccctagttagaataagggcttcttttaagaagcaggtatgtttagtccttctgcagccagagttcttggtaacctgacttgctgaatgtgtgtcgtgtgtgaccctgtgcacacgtgtggtcagggcagatgacccatcatctttgcacttcaggatttcggcagtatgattgtagagacggcgtgtgtgctaagtcacttcagttgtgtctgactctgtgcgaccctatggtctataacctgccaggctcctctgtccatgggattctccaggcaagaatactggagtgggttgccatgccctcctccaggggatcttcccgacccagggattgaacccacatctcttacgtctcctgcattggcaggaggattctttaccactagtgccacctgggaagccccatagggatgacacctgtatggaaatcatggtgttacaaggcagtgtaggaggtgttatagcactgatggacgtgagtcccgtaggaggtgagataagaggtgacggccatgtgggtgtgatggatgtcttcatggaagagactaacttggatactgttttatattggttattaccattaaccatttctgatagagtttggagagtaaccagaacttaaaactcctgctcacctgtgccttttcacttggtgagccgagaaggtgacattaatgctcaagaggaaagtatctgcggtgtgatcatcagagttacctgtcctcctcacttacactttccctcaagactcagttcagtcctggcttctccaggaagcctttcctcttggtccttggtgtgtgagtcaccccctcttctgtattcctagagaatcctccgtgtggctggcactagcagagtgctaatctatgatatcaatttctgactgttgctttacttctgtatacctcactaaattcccttgaggttgtggagcgtatataactcaaccctagcattattcctactgctgttcctaacattattgctaatgtctaaggcacaatacatttttttgttgctgttgagtgaatgatcaaactcagaggttacattcagtataagaaaattagtatttatccaaggcgtgacatttatcatcatgacagcagtaatgatggacagaaatggatggattcgggacatgttttgagatagagttaacaggttgtgttgagggactggatgtggcgaaggagggagacggatcaaccaaagcttgaggagtggtgatggccttgagtggaggcgagggagactaggaagaacaggctcttttacaagtgttgctgggatgcctgcttcacttccgagcagtactctcaggtgggcagttgcatatgagtctagagctccaagaagagatcaagacaggaagtacaaattgagagcctgtggatggcatttaaggccatggagctggatgaattgccttgtgagagcaagtaagttaagaagggggccaggattaagctgacagagctctggcgtcttgtggcctggaaggggcggggaggtagcaaaaggaaccgggagaggaggaggaaaacttgagtaaatgctctcaaggaatcgccagcagagtcaattgctgctgagggattcggatgaaaagtgagagcgaacatcgcctttggcagcagggtggttgtcggtggtctcgctgtgcagagctggggtctggaagccaagctggagtgggttcaggactgagcgggaagtgggggagctaagtccttgagtgggttacaggggtggggagtcatggctcaacatcgccagccttaggttccaacctcccagattatttcgttatgttccaaatggaactcacacactgccctccaaaatctgttcctcttcctgttttctgctgatgaattccctttgcttccagtgatgcagacaggaccctcatggttatatacttctccccatgggtcaactgccatggtctgtcgactcttctccccagcgttttcaaattggaccccctcccttcattgccctagaggaggaaatggcaacccactccagtattcttgcgtggagaatcccatggaccgaggagcctggtgggctgcaagtccatggggtcgcaaaggagctgaatatgactgagcacgctttgttgctggtgccgctgcacttgctctttccaggcactagttagatctgcaaactcctctagtcgcttcttgagtgctccctgcttcattctccctgctgtcagtacgtctatccatcacaactagaacattctccctgaagcatggctttgctcgtgatattctcctgctaaaaataaaagcagatcctttcagcctggcactcagaagcctctgcctcttcaacgtcatctcccactactttctcttcattcagcctgctgtcctgacgggcttgctctttcctgaagataacctgcaccattcagcttccacaccttcactttggccctgactgccttccctcccttatacttctgtattgctagatgctgttgcctctggcattatggagtctgccctaaaaattatgacacttcttgcctttctttatcagtctttaaacttataaaattcttccgtcatagtgatctttaccttaaaccacagtcacctgtaccaccccaacctccactgtcttcttgattaaggaattgggtacaggactcttttactttctaaaagaaagtttcttggaagtttcttgaattgcaatgggtcaggatattctgtaaataagggcctagaaagaggcaccctgctcacctttactcttttctcgtagcaacttcccattgttttgatgaggcagccagcaggttggaaggtgggcacagtaactccaatgaaagctcttaatcaggcaatgactcattactgggcttcccttgtagctcagctggtaaagaatccgcctgcaatgagggagacctgggttcgatccctgggttgcgaagatcccctggtgaagggaaaggctacccactccagtattctggcctgtagaattccatggactgtgtagtccatggggtcacaaagagtcagacacgactgagcgactttcacttcactgactcattactaacacagacactggattcttggctccacggttgttatttggggtagcagtagggaagagctgctgctgctgctgctgctgctgccaagtcgcttcagtcctgtccgactctgtgcgaccccagagacggcagcccaccaggcttccccgtccctgggattctctaggcaagaacactggagtgggttgccatttccttctccaatgcatgaaagtgaaaaatcaaagtgaagtcgctcagtcgtgtctgactcttagcgaccccatggactgcaacctaccaggctcctccatccatgggattttccaggcaagagtactggagtggggtgccattgccttctccagtagggaagagcagtgtctgtgaaatcattcttcccagtttcacctttttttaaaacaggaggtgcctttttgaaatttcactgcttcgtgttctgaaagaacagcagaggccctctgaagactgtaatcagagaaaagagaattagtgtttagaatactgaactgaaggacttccctggtggtccagtgctaagcctcggcattcctaatgcagggagcccaggttcgatccctggtcagggaactagattccacaggccacatctaagtgttcccatgctgcaactaagattggcacaggcaaataaatattaaaaaaaaaaaaaagaatactgagccaggtgttctgtcatcctgtccgccccttggtcgccgtggggagtggctcacacgagggcatctggaggggtacgtgaaggtgccccctcaggatgctgtcttcggcaagtgctgcctttctcttcggccttttcggcattcatcccatttgttgttcagtcgctaagtcacgtccgactcttttgccaccccgtgaactgtagcccgccaaactcctctgtccgtgggatttcccaggcgagaatattgcagtgggttgccacttccttctccagtcatcttcatctcattcagttcagttcagtcgctcagtcgtgtccgactctttgcgaccccatgaatcgcagcacgccaggcctccctgtttatcaccatctcctggagttcactcagactcacttccatcgagtccgtgatgccatccagccatctcatcctcggtcattcccttctcctcctgcccccaatccctcccagcatcagagtcttttccagtgagtcaactcttctcatgaggtggccagagtactggaatgtaaaataggtttcaggcaggtttactttctacctaatcttttaaaaatgaagctgggctattggccaaagggaaatgattgcacccttattaaagacaggattgaaagtaacttttattccttagttaatgaactctggtgctggagtaatgttatcatgagttagtatttttagggggaaaaaaaaaggagtgatatgaccatgtgatttaaaaacctccactcagctgtttcaagaacactggcttttcagtgggcagcttgccagtccttcctggccagctgttcatggtagtcaactgttttggaacatgagcggtattgtaattagcaatgaggaattctgatttgagaatccagaatagctctagattttgcaaataaaagacaaacatctcatattttaagtgggataagcctttacaaataaatttgcttcctcaaaattacttttaattagtactgatagtgagaaaaatataatcataaaattattaaggaaaacctgaaaaaaacttgcttttgacttctttgtcaaaaatgttttacgaccgttcatctatcttccttggctatacgtctccccaggagactttgtgtttcagcattcctaagtgacacgaaatcacacaccagagcgtttcctggaggcttggcccttttgtgacaggatggtctgtggacttcaaccctttgatatatgatttcccctttcatttagaaaaggaaataactgctcctcttttgaatgatttttaattaaagatttttaaaaaatctattattatttatccatgaaaggaaaagtaagttgcttttataaactggtagttaaatatattagatggttcatggctggcattaaaatgctctgtttttttgttttgtttaagtgtttcagtgttttaatagtttaaattttggtagaacttttttgaaccattagtagagtaatagcagaaaaactgagaatagtagctttaggctaactatattggtaatttcaaagagtaatggactccatgtgagcatccagaaataccactctcggcaattaaagtacttaatattttattataatctaagagcagtttccattgggagtagattaataaatgtatgttttctttgtttttcctacaggaaggaacttgaaaccttcaaaggtaattttgtgtttaattcttcactttaaagtagatgagagttaattgatgtcagatgttttctcttgatgatgataatgaacgaatgcattcctttttctttaaatcagacagtttacatcagaaaatgcaagtttgcttaatactgtttttgtcaatttatttaatcacggtggttttgatatcagctgtaacacatgtaccaagtgagagtttctgctaatggcatcataaatagtatgttaggatgacataatgcagacttagaggctgttgagagtcatagttggagaagactctggtttctgttgcatagagagagtctgggcctcacggagaggtgatggtgatagaggtggcttgcaggcaacccagagtcccctgaaccgcctgcggggttttcagtgctggccctgctcagccaccatcttgtcactttggataagtctctacctttttcaagcttatctgtaaaatcgtaagctttgctgagctatattctgagatactaaaagtgcctagcattgctttttaattttagggaacttttgcaagtgagtgtgagaaataattcttggtcgtgctgactcttggaagcactcatgaaaaatagggaaaaccacagagtttcagaagctcaaagcccttccagcttgccacttttcaattacgctttagaggttgagtagtgaaatttctattctcagagaatttcagtaactaagaagactctgaattgttgtttattatgtttcatttgtaaactagtattgactttttgagttactggttaaagattttccagaacattatttacagttgaattgtttatctctgtgatctgtttggatgttttagagaaaacaactaatacttgagataaaaggtataaaagcttattcctgctacatctgttattaaaccatcttgacttggctgggtttctgtttggctgcagttatagtgaatgatttagttcgccagtttgttgagggccttgttaaatgatgatgatctgatgtattatcgtggttatcattattcttaatcaatttgtgaaccacactcatgtacattatttttcatcactggtttaaaataagatttgaaatccccataaagtgttatttttctctctcctcctttcttttagtctactagtgtcttcttatactgtattgggggaggaaaaaaaaaatcaagttaatattaaaagacaagcagagacccagattatgcaacatgtcaactttgcttacatctcagtactgaggctttttttttttcattttgtatgacagtattccagaaaaagaggagaccagcagtttgcaagaggatagacagtgttgtgtattacctgatagaataattcaattcatgcggaaatatcttgtttttacatatatccctaattatgtacagcatttaacagcacgtccaacccacccacaggtcagttaaagctctcaattagaacagaccctaaatggattattgtatcatatctagttttttaaagaactaatattcattaaaaattatttcctcttgagtgttttgctaatacttcaaaagcatgtgtagcttgcaataaaaaaatataactattcttccaagacgttactggagaagagaattcattcaaaaatataataatttgttattttttgaacattgcttttgcctttgtttttccttttaacatttcaggaaaacagaaagcatcacttcctccaactgttttattcaagttgtagttatatttagaagctttttgctaagttggggaagaactaacttttcggggcaaaattagtaaccctcaaggttagtaacatagatcagtgtgatccactgagttctggattcttccttctgtactccattgaggttaatgggttcatgtttatcttgcacttgagatatatctagcaaatctctacagtattattgaaacagttaattatttgttttgtttttttaatattggcagcaggaaggtcttctcttttctccccaatattgcctttctttaaattctttagtgttagtcacttgaatattatacaatatgaaaagggtaagatctttaaagtcttaattttttaattctcagtgagaaggaaccccattattataactacatgtagagtaaataaattggggtgcatgtatatttttacattcgttttctccagatatatgcccaggaatgggattgctggatcatatagtagttttattttattttattaaggacctagtggttataccaatttacatgcccaccaacagtggggatgttttctccacaccttctccaggatttaatatgaagtttaattaaatatcagcatttaatatgcagtttaattaaataccagataaagtgatgaaacctctattttaaggagactgtttttaagaaaattaagttgactgctttggaagacctaatacaggtaaatagctttttaaaaaattactgtaaaatgttaaattagaaattagaaaagacttgggggaaaataataaaaattctgaaagagtccatacacaaattgtttttcacatcttaaattccctttctgcttttaaaaataggctggaaattttatccagtgctgaatacgtggcttatacgaggatttttttcaaccagtggacctatactcaaagaactcaggagaaaagtttggttatattttaagttgaagtgtctgtacctgtgtttttaaaaagcctttgctttggctgctctgggtcgtcactgctgtgcccaggctgtctccagtggcagcaagtgggggctgccgtccagttgtcgtgcacgggcttctcatcgcggtagtttctctggttgcagagcttgggttctaggatgcttgggctcagcagttgccccacagcctgtgggattttcccagaccagggaccgaaccgatgtcccctggcccaccagggaaggccttgcatgtgtgtgttttttaatgatttcctatgttaactgctttattaaaaattaaatgagcagcatgggatctagttgtgttgtataagtggacatctactgtaatctctttactatagcactgcccagccatgtcagaaatgtgactgacagtgtgaaaacatgccaggatttagtggttatcactgtcacagtgagtgggtcaccagagaatgtggagagaggtggctaacaccagcctgagggagtgtgatcccacttaaggctttgtcctgggaagcaaagccagtcaaggatacagagccagtgaaagtgaagtcgctcagtcgtgtccgactcttagtgaccccatggactgcagcccaccaggctcctccgtccatgggattttccaggcaagagtactggagtggggtgccattgcagtaaaggcaatgaaggatacaggaccagagcactcatcaaaactgtccaagacagctctgtgacaggaaggtccagagaggagaaggcttaaaggagaagtggtcatcagtgctagaagtaacgtaggaaggttgagcagaatggggaaatcccactggagttgacagtgaatagataagtggtgacctgatggagctctttgtaaagggagactccagattgcaaatcagaagcatgtgaggcatttaggaaagaaatgaaaaggtcacttgagatagaatcagggtcaaggtcagggaagaaggtgaagttgaagatgttaaggacttgattaagatctagagaagatggagaaaaaatacccagataggttgtccttggagaggatccaaggatctctctttttctgagactttagagaaggaaaggatggcaggtcataggggaaaaaatctgtggaaggaaagactgtctgaacttgcaaggctaggctcaaaagtagaaatataagccaaaacaaataatgctttgcttaacacaaagctgggaattaaagagcatatacgatgggtcagcagagcacggtgatcttgggtgctaatgagaacatgactaaaatgattggccatggaattcaggccagaaaggagaggctggaagagaccagtcaaatgagcaagatacgaggtactggggatggtgttccccttaaagatgggaaacacttgggtggttgagtatatggttaaccacgcttcttgtggtcaaataaagaatttcagtttgacatcattgagatagagcagatgatcatggctaaatctgagtgaaaaagaaggcataaaatgacaatgtcattggggaattctgaggccgttaggagtcgcacttatttgggtgactcagatatgaattatccataccggtggctcagtagccacagcaggtcatgaatttagatgtggcagatagatggagaacttgggtagaacatgttgggtcaattcaagagttagcttaacacgtaaggcaaaacttctgctgccatttggcaatatttaggcaatggaaactcaggttggataataccactgtccactgtcctctgtcctcaaggggctaaagcaccatggcaaagcttctaggatagaaaggcaaatatatgattttaatacaatgacaaaaatattaaaatagaaataagcacactatggtgggagtaatcagtcttttagagagaggcagttgaatgctgacctggcagaaacagataataaggacattccaggaagaggaaagaacaaccgcaaagatgcagggacgtttatcttatttcaagagcacaagttaaaatttaacttcttgttcaatgaggagactacagttagttagtgctgaagcatctggtgcgtgggtacagtagtgaggggtgaagttgagacgtgggcagggcacacatgccacacagcttgtatgtcacgcagaggagctttggctttttcctttggactagtggtctccaaagaggcccatgagtatgcagagtaacgtcagtagtggtgcagaagaaaactggaacttctgtttctttttttatgtcatccttttataattcaatttctgtgcatattctataataaactaggacaggtattgatgtatatgttatataaatgtacatatttgggggtgcatgttaaatgctcttgttcatggcaagactgctcagcagtcactcttgtagctgagagagatgaggtagggatgggagaaccagaaggttcaatttagggtaacaggaggcagtctgcatcatagagcaggttttctgggatcataggttttctgaaagacagattggaaaagagcaggtctagagcaagaacggttagttgagaaactactacatatactcgaatgatggcagtggttaaatggagagaaaggcccagattcaagaatcaagaatttcatcactcttgtgagaagtctaggatgactggaattctggctaggacatgtgggtggacttttcttttaccaggaaatgtaatacgggcagaagagcagatttgggagggaaccatagtggattctgttggttttgggaggaggaggtacagtatcagttgattaatgataataattaatcagttcattaatgcaagcaagttcccagtgaccccacaaaagtgcagtttgatatctgatagagaaatgctttttaaaatgttttattgagattttactttcatatcacaaatttcattcatttttaagtgtacgattcagtgaatcttagtaaatttatagaattgtgcagccatcatcagaatacagttttagaacattttcatcacccgtaactgttcctttctgcctccctgcattcagtacccttttgtgttcccagccccaggcagtcattaatcagtttctatctccatagactttccttttctggacctttcaaacgaatgcagtcatgcgacatgttgtatttttgcttctggattcttttagtcatgttaaatttttggagttcatccatgttgtaccatatattagtagacggttctttttattgctgaattaatgtcccattgtatgaatttattgcaatttgtttatcctttcactggtttatggacatttggattgtctccagtttggaactgttgtgaatagtgctgctatagacttccatatgcacgtctgtgtgtagacgtatcttttcatttttcttggatatataactaagactggagtttctggatcatatgatatggttgtgttgtgtgtgttagttgctcagtcatgtcagattctttgtgaccccatggtctgtagcccgccaggctcctctgtccatggggattttccaggcaagaatactagagtgggttgccatgccctcctccaggggatcttcccaatccagcgatggaacccaggtctcttgcattgcaagcagattctttactgtcttatccaccagggaagccctatgataaggttatactttttaggaaactgccaagctgttctctgcagcggtggtaccagttacattcccaccagctatctaggggttgtggtttctcctcacccttgttaaccttgatatccttgactcttatgcctagctctgtgatccattttgagtcagtttttgtgtctgtgtgatgtaaaagtctaagttttcttgcttttgtttttcacatatatccaattgtctctgaactactttttgaaaagatttttccccccattccattgaacttctttggcactgtcacaggaaaccagtggccataaatgtaaagaagagtatattgctggactttcagttttgttccttattgtcagtaccacactgcctgaattattgtagcttttgtaatgagttttgaaatcgagaagtataaatcttcgaactttgttcttttacaaaatcattttggctattttaggtcctttgcatttctgtataaattttaggatcattttgtctgtttctaccaaaaaaaaaaaaaaaagaagcagcagcctgctgggattttgatagggattgttttgttttgaatttctagttcagttaggggagaattactatcttcataatattgtgtcttccagtccatgaacatggatgcatcttcatgtgtttgtagctttgattttcctgagctgtattctgttattttcaatgtgcaaagtctcacttcttttgttagatttactcattttattcttgctgagtgaattcagtcttgggcatattaaatctgagatgtcattacagatggaaatgtccagtgggttgctggacgtcaggagagagacgtgagctggaattgggagcaggctgacccgggtgggggtggggagccttggatctgggtgcagttgctcggtgagaccaggcagaggaaaacaaaggagaggggggttagaagtctaggaagcgctagaattcacctgacggcataagaagagagcgagctcccctcgccgggggcggagtacagtcagctgcagaggtggggatgtgtgtctcggggcgtgtctcagggagcgccaagcagtgccacgttattacagagaggacagaagggaagatggtctgagaaggggcatgtggtctgtcaactaaagttcgctggtgacggtcctgggagcgatttcagcagcacgggggttcccgtgtggtctgggaggggaacccagctggcggaggacagggggccagggggaggttctgtcgtgttccccgtgtggcccgggtgcctggcgcgttggtactgactaaacatttgagtgaatgggggagtagagcggggctttcgaaatcacaggcttaaaggggagaagagaggagaggctggaggggaggagggtttattgatttctgagaaacttgagtgcctttgtgtgaaaaggggggagaaaagaggctgcagacggggagtggctgacagtgaagctgtgatgcagagaggaccacggtgaggggctcagagcacacgacttcgaaacaggaagagactgtcgacaagtctctgtaactgttggaattgtgaggatttgagatacttattaaaaatacatagcaccttccaagctaccagtgagtgtggctgaatttgaaggaacctttaggctaaagctgtgctgaaagtgaattggggggagtttaaagatcccttcgtgttgggaggcaagctgtattcttcgcctttatcttaatgcttgcagagcactgggtctcttctctcatctgatatgttgtcactaaggcgtctttgtgcctctgtgatggactcagacagatttagtgtgttttcagcctctcccctaccttctgagcagcacttggtatggccccagatacgtgcatacatctttgcacaccagagccctcagagcttgcatttggcttttatagaggcagtagattctgatacatgtctgccgaagtcatcagcagaaaactaacaggcttaatagaatttctttggaaaaacctgcttctggctccagcctcagttcctttgttctactcccagaagatgcacagcaggggagctgcctggtaaactggaggcttcacttgaccagcctgagcttctgctcagttctgcttgctcagtgcccacatccatgtcatctccaggattcaccgaaaatagtcagaggaatccctgtaggtggaactttactttatgtttttttctttcactgcttttctttaaaaattttacctccatgctacattgcagtgtttggtggtgtgcaggtgattcatcactaaaaagcagaaataaaatttcaactcgattggaacctctaaccagtaacatgttaatgaaagcattatttgtttctttatattacaaagaagtgatagtcactataaattaatacttaaaacaagtggaaaatgtttcctggcaatctgggactttgctcttataattttgtgtcctagccccatcgggtgaaattcaccagtcatctttatgaggcagcacccttataattgaaagataaatataaaatgccaggcattagagtaatgagtccatttctgacgtacagctccgtaaaaccaactcggcttctctcgctgctggtatgtgcatttcccaagaagtggctacttagttaaacatgtgagccatagccaactcgatgtgaagttaaagttccttccatgccgctgtgttgggctcaactaaaatggctgattttccaaatgggttttggaaaggtaataatgcttcatacagattaaaacctctatgttattttcctaattttacagaactttggtgtttcctgtcatgtgttggtaatggttttgtgatattttattttaataaatagcacatgtaaggatattaaacttgtggaatttactgcaaaaattataccttaaaaattaactggtagctttttttttttcagttgagtaatgttattctacccatggagattactgaagaataatttttaataattattgcatttttaaaaactccatattatgcctctaaggtggcacatgttatgacatgttatatatcattccctgtcagatggatcccacttgtttctaaagggaaaaaatgaaagaaatacatgtcgtctgagcttttctttactttattgtgatttttctgttcctgagattacatgttaaagttgaacttgaattaaaaggtaacttccttctccctttcttaagtctatcttgcatatagtgtggccgactctttaagctcaggatagacacattaatcaaagcaaaatcatagctcaggaattcattctaacgccggagcattcatgaaactctaacccgaggtgttcctgcattctaggtcattatttgttaagtgttcaggaataaactggtaagaatagagtgagaaccttagagcttattttttaaagtatttatcagtaatatatgacaaatgacactttctcctcttccctcagttacactgtcttaacatggtggttgtgagtaaatatttgaatgtagatataacctggtattaattttatttttttaaattatttaagaaattactccctgaaaatcttgacttcttggtgaatactagctagatctttttttttaatctgcttccttttttagtttattaaaaagatggtttatattatgtagcttagtattttagtaaagttagtatctatatcctagggtacagaaatattcatatcctgcctgttgattttgtctctaagtcagtttaaagacctagttgattgtttattctagtaactgtcataagatgttacactgtggcatgacctagaactctcaaagatgacattttatattgaagaggattgtaattctaacagcttaggtagatgttaaactgcaaaaaagtagagccttgatcagagttgtggtgcttaaatgttacctttctgtgctttcttataatgagtatatagcactcttctgtaaacaataattatagcaatagagtctttttagaaatgtatcaggacaactttccgttgtatatcatgtgtgtttggtatcatgaataaatacagctgttctgtttcattacctttttgctggaacactgtataaacttgacagcaaaaattatacctttcagaaaaactagattccagtaaaactaaactccagcaccacgaaagaagaggtaagtgaagattttacctgtcaggctcaaaaagagagtttatctgttgaattcatatggagccttatgattttctcttagttttttgaaggttcgtgctggaaaataacctaaagggtcttgtagctctgctgtttaaactgtttgggcaggtgatggagttagcactttctcagaagactggtccatagctaatgatttttatggatttccagggccaatcaagtggctgactgagccctacaggagagccatctagtcaccaaggaaagtcagccatggctttccttggagagatgtgctcatgccataaacagaaatagatgctggtgaattgttttgttcatgcttctggccactttcaggtgggatttcagtgcacttaatgatcctgagtgaggatgttacatactaaggatatcaaattgttgacatatgtattagagatatttaaaatctaagcttggttatttgccttttaattttgtttgcttttttcttacacatggaagtttcatatttttatgtattcagacaggtattttaaaatgacatcctccattgtttttatgcctaaacagttctctcccaatccaaagaaataaatgttaacttgtaatctcttctggtttttattctagcttaattatcatttgctgattttactctaacaaatttggaacttatattgatgtatagcgtgaagtaagcatcagttttttgctgtagaagtaattaatttttctagtactatgaaatcatcctttgcagtcctcaacctcttattgccaaattttgttggctacactttaaaatttttatttgttgatttttagttgtgttgggtcttcattgctgcacggatttctttctcattgcagcgcgcaggggctactctctagttgcagtgagcaggcgtctcatcgcggtggcttttcgtgttgctgagcacacgctccagggcacacagccttgagtagctgcggctcccagtagttgcggtgcatgagcttagttgctctgtggcatgtggaatcttcccggaccagggatcaaacctgtgtctcctgcattggcaggcggattctttaccactgagccagtggacctttctctggcactttctccctctttcttcctgcatcatctgctgaatcattccagcacttactctgaactgtaaacttcttatctggtattggagtatatagccaattaacaatgtcgtggtagcttcaggtgaacaacagagggactcagccataaatatacgtgtattcattctttcccaaatccctctcccatacaggctcgcacgtaacattgagcagagttcagtgtgtgctgtacaaataaagaggtccttgttggttatccattttaaaatatagcagtacgtacatgacattcccagagtccctaactgtcccttcacccaggcaaccacaagtttatgttctaagtctgtgagtctctttctgttttgtaagtcatttgtatcatttctttttggatcccacatataaggcatgtcatacagtgtttcctcttctctgacttaacttcactcagtataacactctcgaggtccatccacgttgctgcaaatggcgttatttcattctttttaatggctgagtaatattccattatgtatgttaccacgtcttctttatccacccctctgtcagtgggcatttaggctgcttccgtgtcccggctgctgtaaacggtccagcgcttactctgatggtccccgtgcttcactcttatttttccgtctcctttgcctcattgtcctgcctaccccaccatcccaggtgggaagaacctctgggctccctccttgggccttttcactcaccgttctgtggtctcatccgttccaaggctttaaacaccatctgatgctcatgactccctgatgagatggctcctgacctgcctctcccctaaattctagactggaatagccaactaccagctcaaatctctacagctgtgcctacaggaactctcaacccagcacggcagagcctggtctccacacccatcttcccaccttcctggctgctccgtcatcccagcgacaccaccattcatttctcctggggttctgaccacgacaaacacacgaccgaaaaataagatgctgcttgatccctcgcttgctctctcacctcacatccgattctacaataaatcaatcagcccaaactggatcccagatctgaccggatcttcccatctctcccagcaggtccaggctgcctcagtcctgggtagaagctctggtggcatcctcgcccagtccctgccacgcctgtctccctccctccccacccagtatcgccttttccccagatgccctgcagcctctcatcgcactgacaacagcgcccttctctctgctcactcagcccgctgtttgcccccacccctgacctcacctcttcccactctttcctggctcctccgtccagccccaccggccacccgctcttcctcccgggggcccagcacggcccccgtgcctggggcttctcctgagccctctgcctgctctgctcctcctccagacagtgtcctggctccctcctttccgctaccttctcaaaggtatccatgttttcagttgtgcattcttctctctctccctttacctggctttcttttatgacatacctttcttttctttctcttacgtggaaacctgatatacacttactcttctctgctgcacaccgtgcgcagagacagggaccgacccaggactcggcgagtgttcactggctcgatggagtcccagggcagcatcctgtccccttgccttctggcttggattccttttaactctgtcttctaaacactgtggagccatctaactagctatctaaaaattcagatattcagatagaatccccatcagtcacatcatgagacctagaagtggctcctgattcttccagcaccgcttcctagctttagtcacgagagagtcacagtcacagactcacatccacatatcggctgtaccgcttctgactttcttctctaagtcaactcattttaaagagagattttaaaatacacttcttagggaattccctggcagtccaggggttaggactcagcactttcactgccaggggccagggtttttgagccctgatcaaggaactaagatcccacaagccatgtggcacagcccaaaaaaaaaagtttttagtaaaatactcttcttactataaatggaaaacgagtatcacttgacacaaatagaaactgcataagtaaatacataactattaaaagacttctgccaccacaaattattctgcatgcagtattttggaaaactgagcttcaggattaagtgcaagctctttaacggagtcaataaaattcttcccaaaagcccatgcttgcctctccggcttcttcagtttgtttgtttggtttttttttggtactgaaaactttgaggatgtattattacttgctggtttatcttgaaccagacagttttttgtaaagtgtttttctcactgatctgttaagaaagaaaaaagaaaacaacactttaaaaagaaaggctgtcacactgaaagcaattttgccgagaggcaaaccttgatggccaagcattccccgccttcctgccccgggtcctcttggcaggagcatttcttcactgctacttttgcaagttccaccatttgcacttttgtgagaccaacgtgaaaatgccagtcccagccgtaaaacggcaacatggaatctaggaggagctctcctgtggtctcttgcccgcacgcgtgactttggagagtggtggccgctttgtagggtgagcagactccgggtttctctttcactctttcgttcctctctattcagtcttctcacatttcccgtgcagcgtcagtaattaccgtgagaggatgctgtattctatctaaagagcaagtgcattttctcacaactagggtaagaaagcttatattacagtgtctgcccccttttctctctctctctctctctctctctttttttttttttttttacaaatttcaccctggaaaagcccaaagaagtgttagagtccatgaaagtcagatggagctatgcctttaaattgctaattcggttggtgtagagtcaagggtgaagatattactgttttctagagtaaaatggttctgttaggttggcaaagttttgtgctttgtattaggggagaacacatagcagaaaactgtgtttgtagaataaaccagttttaaatgatgtgttcagaaaaatgagtacttagagccccatggtggagagccctcgactgagcagaaccccccctcctctttctgaatgccgcttggattaggagaaaaacattagaaggtgtcacctctgactggcaaacggaattgcatgttctcatgtccaagtaactccttagagtggctgctctcctcctgctccctgacatgcatcttttgagcatttgggtggaatgcttggtgagggctgtgctctctatgctagaggatgcttatttccgtgctcactggagagcacgactgggcttcccccgtagcgcaggggtaaagaacctgcctagtgcaggagacacaggttcgatccctgggtcacgaagatcccctgaagaaggcaatggcaacccactcccagtattcttgcctggagaatcccatggacagaggagcctggcgggctgcagtccaggggtttgcaaagagttggacacagctgagtgttgatacgttggagagcatggcagtggattcacttctaatgatttttggtgaaagcactatgctccgagcagaatgagatccacagtatgagacaccccacgttgtacaagtgatgtgtccgcatcttcacttgggttttgggactagacacctgcctcccctcacctacttaatttcctctgtctgaggggccttgggttcccccacacaacccctcagggcttgaagtgatgctggttcccttagtgaacacccatgcttgttgttcttgccatcgactctctgcacacctgggatgtgcccaccaaggaagagcccgccagtgctggcataccccgccgctgatgcagcgcctggcacctaccaggccctcggcccgtgctcgcaggagggagggagggggacattcatccatttatgcaccatctctgtcttctctaactttctgtttttgtgatgaggcggtctgtgtgagttctgccttggtgtgtgggctcagattctggagaacggtgggcttctccagagaaaagctcactttgaagtgcctaaccacgtgggtttgtcatctttctgttgtgaagacatttttagcaatagcgacagactctctcttatgctttagaataatgctgagaacttgcattaactgcgtagaggagaagaaactgtttagagtgaccgttctgtgttttcacttttaagaattttgcaaagttgactttttttggatgagggtttttgtgatttctgttttcatttattttgggtaaactatctaggacggtgattgctttctcatggtcagtatatgtttactttttaaaaaactgccacactcttttgaaagtggctcttctgtttttcaatcccaccatcaaatatatgagagtttccattgctccacatcctcatcaacacttatttttatccactttttaaattttagccattttagtgagtatgtaatatggcagggttttggggggcagttttaatttgctcttctttattactaataatattcaacatcttttaacgtgcttatttgccattaggatgtcttctttgataaaatgactcttcaaatcttttaatttcaatatttatttatttgtttggggtttggattttttattgaaatatagtttacttacagtgttgtgttagtttcaagtatacagcaatgtaattcagttgtgcatatctacatattgtccctaagtcgtgtccgactctttgcgacctcatggattgtaccctgccaggatcctctgtcctccactatctcctggagcttgctcagattcatgtccattgacttggtgttgctgtataaccatctcatcctctgtcgcccccttcttcttttgcctccagtctttcccagtgtcagggtctcttccaacgggtaggctctttgcctcaagtgaccaaagtattagagcttcagcttcagcctcagtccttgcaatgaatattcagggttgatttcccttagggttgactggtttgatctacttgcagtccacaggactctcaagagtcttctccaacaccacaattctacataaatatatattcattttttacattctgttccattataggttattacaagatagttaacatcatttcctccaaagctgactttttatgatgacttatattaaaagctcattagcattgacttgcccagacatgttattgatttgataaaccaaattcttgaatttataaaaacctttgctttagttttctcttattctgtaccatgtatcagacatttcctatatggtagcaggatggaaactttgggcattgaaactagactataaaataaatatacctggggaaaaatagtcaaagttaaaaacaaacaaataaaaactggtaactttgctccagagaggatatacaaagcttaatccttaaagcacacgttctagtttagcccaggttatgtgttcctcttgggcactggagcccgtgattaagagcacggaatctggagccactcagagtgctccctgggcatgttatgtaacctctctgagcttccatttcctctttgaaagatgaaaatgagaacaggacctatatccttgaattgctgtaaggactaactgagttggtacatgtacagggctttcagcagtgcctggcgtttacataagagttagctgctgttactgcagagatgaggcagatagaataagtgacctgttttccattatttgctctctgtgtgttgtacttgaaggctcagtgatacagaaaaagggaagaatcaagtccaaacctctctgggttacagagctgagtttctgtacgtcataaatacgggagggcttgtcagcagttcagcacacgggctggagttttgcatccttttatcacttacagctgcatatccttggcgaagtgacttaacctctgagtctgttggcctacctgtaaaacgggaataatagtggtacctgtctcatcgggcttttatgagaataagtgaaataataatagtactagccatataataaatttggaatgatgttaagctctaattatgagttcatactaatcataattcttattgatgggactcgtagctctccatttttgattagccatgggctgtctctctaaatgaaaacagtggcaaagctctgtagattaaggtaattgttcacatataagtatgagttggctatttttatcataagtatatctttaggactcaaactttggtttcagaaacagtttaacaaatgtgtgttagtaagattaaactagagtattaaaatagtttttggaaaaatgtcttgaaattacaaatgaaaactaacagaatattttgagttataaaacgagctactaacttttgagatttatagatttattctctcatccctcatttattctgctcctgtcgagtccaagtgcaggatgtaaaggtgaataggacttcatgtctgctcccatcaggaagttcacagcgcagctgggagacagtgagcagctgcaggaccaggagtgaactgtggggtcagcgagggctggtgtggggttctgggggtgcctgccagacacggaagggcgcccggaggaaggccatcagacttccttgcaatgacgtggcactaagcttgtggcattctgggcacctgtcttatgagtacgcactgatctggaaaaagatcccacgtggctactgaaaccccgggagcagtacttggcagggaaactaggagggagacagtggagggaacaaggggagggaagcttcttcacgggtcagtggtttacagtctttaaagagattacagtgaggcttaatatgacaggtaatagaccttatcagtctcttaatttagattgacagttctttgaataaatttgaactgggactagctgaaatccttcatttgatcaagtagacagttaaaagaattattatgcttcccccaccccctttttgttacggaagttatcaaacatgtacagaatagagtatggtgaaagtccacgtccccatgcttcagtaccaacacacagcccgtcctttgaaaacaaattcccttatgtggtataatttcttccattagtatctcaatgtatacctctaaaaaataagacttaactacaacacaattatcatacctaaagtagttataacttcttagtaccattaagatagaaagaggttgtaatgctggttttttaggttaataagtgaaatagaagtttcacttattaatagaatagtttaagtcatatatctttgtatgtacatttatctctgtaatacctagtttactaatttctagtttactaaaagtatgcttttgaattattctttatttgcatattgtctcattcggttcacaaactgccttagttcacattaaaatgttattattttatgcagaaactttaaccctctttaagtggaaatttataaaagtctgtgagcatagttggcttatgtaaagtactccaaggaagaacagagtgatcactttatagagtgtttactccacaaacaatcagcatgtctcagggacctgttggaaggggaaagaatttgtaaacttttttgtctgccagtgagccccctggtttagagggtggagttttggtgcttgcccagagaggaagcagggggcaggtgcaaacatagggcttggttatggcagggagtccacggtcctcgcgcagctgatgaaatggcacgtttgcaggctcctctgcttcgtcctccttttattctcttgggcaatgagattaggctaatgagcagatttctgctgttttcataataatttttcaaaagttggccgtaaatgtcacacagaagaacttccagtagtgcccccatttgatacttcaagttgctgcatgcgctacctgtgaaatacagctgaacacccgtggatccttgttcagcagcaaaggaggaacacctctttccaccttaaaaatgttattaactctattgctacaaatatgcagaagtgattttttaatgaagagaaaaggatattttggttattaatactctattcagtacatcaaataaaaatgtgagacagccaaagaaagcattctgtacatcacaatgcatttttgaatggaactagtttttgcagaaaagtgatttaaatccttgtttcagtaagcctttatttgaaaataggaaatccattttcatgggagtgtctctcggcagggtgtgaagtgtgtttttcttttggcttctgcatcagcttcaaattttagtttattcccacgagattattgttagtaaatcaggaattgatttagtcaatctctaagtcagagtaggtcacaataccaaaatataatttgatgaaagtatgcagtgtaggagacccgggttccatctctgggtcaggaagattccctggagaagggaatcttaccttggagaaggcttacccacaccagaattcttgactagagaattccatggacagaggagcctggccagctacagtccatggggtcacaaagagccactaacactttcacttttgggcttcccaggcggtgctagtgataaagaacctgcctaccaatgcagattagacataagagatgtgagtacgatccctgggtcaggaagatcccctggaggagggcatggcaatccactccagtattcttgcctggagaatcccatggacagaggagcctggcaggctgcagtccatagggccgcacagagttggacatgactgaagcgatttagctgcatgcatggaaagagtatatagcctatgtgttttacttttagattttttaatttaaaaattatttcaatttaaattacctttgtgttcaaatatatcttatggaaagtgaaatcaggctctttggagatgatataactggtttggctttctgtttctgattaactgtctatttaaagcttcaaagtaaaaccaaatcgatcatttgcatattggtatctgtgaaggttatccaaataaaaataaggtttttaaaagataaatttctgctataatcagtgtttgctgattcaacaaagacttgtgcctgtttctttgctaagcttaggaaaattgaagttgaaaagatttttactttcaaggagctgatagtctagtaggaagacatagaaaaatagtaagatagggtgtacaaatgtatttggaacagaagggaatccctaagttgtctcaaggctgttgggaaacatacttggaagcctaggttaatggtcgttttattctgtaaaccttaacaaaaagtaaatactagaattcacttgttgattgcccgctatgtgcttggcactctgcttgccagtaggttcacgtgtatcagtatgtacatgttcatataataagtgtatgcacacatgtgttcatacacagtatacatacaaatgtacagacagacacatcagagatggagagatgcccttgtggaggggggtccagcaggaagagacaggcagtttacaagcaatgaccgtcattatcacagggacacagtttagactggtgaggcaggtggaaaggatgactatcgtctgagccagaagaatgagaaggagaaaaccaacatgaataaaggagagggaagaaatttctagcagcaggaaccatgtgttcagcggttacaaggaaggaaagaacttggcaggtgtgaagattgccggaggctggagccacggcagaagccagaccccagaacatcttacagagaatttgaaagagtttggatttcattcatactgcaagggaaggccgacagagtaagtagcgggtgtgtgtatccggggaaaggagtaacatcggattcataacttaaaaagtatgagtatgtgggaaaatgactgttgttttctggttaggcgcatgggaagggttaagttaagaagcagagaccagatagaaggatgagggatgggactaggatgaagaccgtggggatggaagagacaaaagtggattccgggatattttggaagcagaattaacagaatttggagtaattagctattggagagagtgggcagctttgtcatcttctcagaaataggaagactgaaataggtcctttggaactggcaacacgcggaccattggtccccacaaggagagccgcttcggtggcgtgaaggggacgtgagccatgttggacacatcttgttaattctcaaaacagccttagcggccttgtccctgttttacgaatttgaaaggtttgaaagtgactttccagaattacccagctagtaagtggtgaagcaggcgtttggacactgtcgtcttgtgctcggaggctgtgctccgtccactctgctaggctgcctcgtggaggacttgtatgttccctgtcagatcattttgatttgaacatgtccactgactaacgatgttgagcagcttctcatgcgtttattagctattcatgtttctctgattaagtgactattgaaatattttgcccatttcttaactaggttatcttattgagttgaaagagttctgtattttggatacaagctctttatcagatatgtggtttgccgatattttcttccagtttgtggttgttcatttccttatttcttttgaagcattaaagtttttaatttttgtgaagtatcttttattggaaaaaaactaatgaattgtgcttttgttgtcatatctaagaattctttgccagactcaaggccatgagactttattctcttctagaagttttatcatagggtggctttcacttaattgtggaggtcatggaatccttctgtgaggaagtggtacttaggctgaggtctggaagctgagtaggagctaaaaaggggaggggagagatcccagcaaaaggaaatagcatatgcagagctgaagtctgatgagattgtgtcaagtttgaggaggcagaggaaggagaccatttgggctgggggcagggagtggtacgtgcgagactggagaggtgatgggtctttcaggccatgtgaagcaggtgtgtccagaggctttcattaggcagggagtgacatgaccgtgtttgctatgcagaataatcactctggctactgtgcaggaaaggattggaagaggactgttgaagatctgactgaccagctaggaggctcttgaacagttagtgagaaatggtggtagcttggacccagaggaagtgggaaaattaggactattagggacactcatgggcttgcctgccttaagttctgcatggttgagcttcccaaccaggaggttataataaagcacgagtaagccagtgtctgtggcttctactctgttccctagcagacacctcttctgggttctgtttgttgggttttctttaccagaaggagatagtcctaatagcccacacacggcaatttagtttgaacgttttcactgttttccttctacttcacaaggttttggaaaaaaattaaaagccggttattcattcctatgtccatttcattaaaaaaaaaaaaaagagtaagtacttattaaacgctacacacacataagatcaagtccctttgttgtagaaaagtggcttataatctagagttgagtagtctcagatggaccctcctatactgttaattcaggaagttatcggggaaatgtgactgagtctgatgaatatgagagaacaatcactgtgccacaaactgtgagctctaacccacaattcaacaaaagatgattgtgagacattttcagggactatggtatcaacttgaactctgagcttttattttagttctaagatatgaaatgtggaagaatcttttctttgatttttccagagtgtcctttaattgactcagtgaattaagagaagcaaattattgtttctcaaagggattacaaaaaaaccaaactcactttatctttcaaaatacaacagaaagcactgggatttctagcctgatggtaagaagtatcttactcagaaaactaaaacatatagatttttttctacatgcttccattctgtctgtgaaattgatacctgtgaacaaatttcctcttctacaatttcctgaagtgtacagaaaatccaaagcttctttgacttcagttatagagaaagaggtaatgaaaggctgctataaagaaggaaagacaatgtgatgttgaaatccctttgccaggtcgttttagcttcttaagggcatacacggtaaatgtaggaccttttagaccctcaaaatttagcaattctagaaaatttgaaaatatttcatctcacgtgcatacccatgatggtaaatgggaaagaattaggattaagaaggggcttaaaaaaaaaaaaaagtcgtaagaaatgaactatcagattctgggacacacgtaggtttttataagcaaacttaagtactggcaaagctgtctgagtggaaaaggcagagctacctgttgccaggagcttcgtcattaactgccttgaccatggaggatcagagtccccctgtgtacaaaggaaggcaggtgtaggacagagaaaggcctgggcagtgtgtggcagagtgctgatcggatcacttctgtccctctgggacactgtgtggttctgtctcacccaaactgagaacagaatatacatgtatctgtatggcgccatcacacataacatgaagtttgtgtttttaagggtttaaaaatcttaagtctctatccaaggccttagttcatatgctaatgtattcaaagaatacggaaacccagggctgctccactctttaatatagtcaattcagtttgtattactataccttcaggcagactgtttcataagatagcaagctttggaggcttttttggttggtaggtttgtttttctcctctgcttatgaaaaaataaagtgataacctgaaattagttctgtttttgtttaaacttctttcttgagtgggtgtttcccgaatactgtgccttcttactcctatcttgtaattagtcatccatttgctattttcacaatcattcttaagtacctactttgtacctagaacaggggaagttccctaagaaaacagtatttctctgcagtggattggtgggcaaggcttcattctaaggaatgtcgccattacctggaaagttcacggaaaggaccctgtcatgtcatcccagcttcagaaccctccaggtcttgttttaagagtggtagctcagcttatggacttttcttgaaaaagaataggcttcttatagatcttgctgctgtgttaagtacttatcatcgagtacatatgagggaattcccataatctcatgtgtatgttgaactcttcatcaaaaggataaatatccttacggttgtatgcttctgaataaattcatttctctttcagtttctcggcccactttcaattgtcagccccaagggaaagttcactgcatcattttgtaaatgatggattggattttaaggagtggctcagaggctgtattttattgatcatttaggggtggcattatttttggaatgctgtctgcacccagcccgtggaagctagttccataaccagggatagaacccaggccccctgcgtcgggagtgtggagccctagccactaaaccaccagggaaatccttggatgccggttttaacggttcccaggactctcggccagcttgtccgcagtctctgggtcatggcgtttctgtattagagtggatcttgttaagctctggtgtttttgaacgtgtgctgcactggttttatgggctgatctgacgtcactgtccactgccagcccccgagagccagctgcaggcactcttggctcgcactcttggccttgctggcgatgcatgtctcttctcagcgcacgtgatgagatgccagtttcccttcagccacagcgctctttcctgggctgctgtgtctgtctcctgcgtgactgtgccttgaacacccggcctgctgggactgccttccgtgcctctgctggcacgcagccagcgggaagcctgcttaccacccacctgtgcacgtgtccctttttcctgccagggtggttcccaggtcattcaccactcagccaggcactgagggcaccaggctgaacgtgtagggaaactctctcctccatctcttaggtttagtacctacaccgtgagcatcggcctgacaaaggacaggtattttttaaatttgatggtagtattttaatttgtatgtgtgcatggaggcctccatagaaaagaagtgaagacccagagcagcagttatactcaggggtttatataccattttaacaaagggtgtgataaactcagttcagggaacatgagtgtgtgcggacctcgtgggagacagggatcgctgaatgaggtttgctgcacagactccagtggctgccttctctgttgatgcctgctagggaaaatggggagcctgctttacaagtggaaatttacactaaatgcttcctttgcaccctgctttcagagaggggaaggccaaagagcttctcccacttccgctgtttctgtcgcctttagccatagctggaaataatccccctgccagggtggtgtatttgggggaggcatacccacagccctttaaaagacattgtatctgccctcgaggaacctagtgtctggtgggggggacagaggcaagcgaaactcatgcctcacagcaggagggagcaggaaagagcgcctgaaaggccctgcgtttgtcaggggggctgcagttgagctgagacccagaggttggctgtggggcacctctgagccaggggccctgcgggtcacaggcagggcaggggagagcacgtggttggttggaggcccaggatgttgaccacaagtcctgtgtaactggggaggcagtttctcagccatagctcctcagtaggggtctagtttccgggctgttctgatggaagtcctcactgtccataacagttgaagagaaagcaggaagagcagagcataagctaacctctgaacacagttttgaatcaagacagtgtgtctttggcacttcgtacttgtctctctcactttctggtccctctttctgctaggtgtttatttccctcgtggcctccctcctgaggccaccatcacggctgccctgccaccccctctcttggtgatcatctgtctttctacccgtttccccgccatctgcatgagctgttagtctgagagaagcattaggaagagagcaagcataagacactaagtcacattaaattttgaatgttgaaagtttctaaacactcctaaacataatattctcaactttataaaagagaaatgttgaatatgtgactctctaatggtgaaattttaggaagtagtttgaaaggaaaagcaggctgccccgtgtgtcgcgccccttcttcatgcagcctctccctccccttctggactctgggatctcgaggcccatcccccgccattgctcctggctgtgccaccagcctgtctgggaagcagggaatccatgtctcagccccgcaccctgttagctggctgtgctgtgcttagtcgctcagtcgtgtccgactctttgcgaccccatggactgtagccggccaggctcctctatccatgggattctctgggcaagaatactggagtgggttgtcatgccctcctccagggaatcttcccaacccagggattgaacccaggtctcctgcactgcaggcagatccagctgagcttccaggcattgagggacttagagtggaaggagggagggaccgaggtagccattcctggtactaatttattcgttaagtcactcatccataagcctccagcagctcataactgaaagtgataaatccccatttctaaagtattttctggaaataatgaggtatgatgggctttcaagcatgctgagatttgtcactgacccttccaggggcagaatgtttccaccttggggcacaggaacatttataagaggctggtatccaaaagcatgttgagctttgggtctcgtgtggtaattatttataggtgaaatatatgcactcttctgttgtaaatattgtgggaaataaaattcagagtcctttccaaagtattcctgaattcataatagatctctgctgtcatgcattctctcagtaaattgtcaataaaagtacacccactcttaaacttgaaaaggttcgaaaccatggttctagattataatttttcaactacttaatttgaaatgaaggcagcgcaagtgaaaacatgtctgaaggtaattgttttgactattactgagtgttcttcagtgttatttagcctaaagaaacctaacatctgaattattctatcagtgtagagaatccttatgctaatgtgtaacatcacactgaacctgattttgatctcccagcattgctccggtggagtgcagggaaatgcctgtccatccagtgggtcccctcccctgtggacaggacagctcctaagggggaggcggggtcagccccatgggagctggattccggtgttctgacctgggctgtcaggggatgggagatgaagagcagttcctcaactttgctttttccttgtgttaaaatgcagatgtcctgttagctagctgtacaaacactgggagctcagtctggtgctctgtgacacccaaggggtgggagggagcgccaagagggaggggacatatgtatacttatggctgattcatattgttgtatggcagaaaccagcacaatattgtaaagtggtcatcctccaattaaaagtaaattttaaaaaacgctggtaggaaaggtaacacaagctactgagggcggaaatgagcttcgttatgtagataacccttttattcttaaaaaaattttttttatttacttgactgcgctgtgtcttagttgtggcacgtgggacctagttccctgaccaggaatcaaacccagaccccctgcgttgggagtacagagtcttagccactggaccaccagggaaggaccgctcttattcttttgggttatgtcctttctgtgcatcttcagaagtggtacccttaggtgaaagtatagatttttaaaatcagattgctttttatgagtcttcttaacaattcatttcatgcaaacactggtaatgaaagcatctcacctcactcttgtcagaatcgtttttatattggccagtatgcagttggataaaaacagtatttcatctttgataaaatactgtgctgagcagtttttttctgtgaattgtcttttttctactgaaaagattttattgaggtctgatttttcctagtaggttgtcgttgttgatggtaagaatgacggccttttgccatttgcggcagctttctcctcatctgttgtttcccttttcattgtatttttttaaacatccaagaacgtttactgttcatgtgactcaggatctgtggattttttcaatactgtgtaaggtcccttacttgtaactttaaagatttaattcggttttctttttatttttccatatgtcatttttggtattcggttatttaattcatctcgtatgcccttaaattgattttataaataacgagctaattttcacattgccacttattgcaaaatgccttacttcctcatttgttccaaatatatcctgaattatatttgtttagcatatgatcaactctctcttgggggttttccattccaataatcagcccatctctttttgtttttcataatgtttaaattgttgttttgtgaagtgttttaaaatctggtgggacctacctaggcttcccctcaccccctccttttaaaaaatacatgattaagttttgatgccagaattactatgaaaaatccatcaactagcttttgattcttttccatacccatggcctttgaaaacttgaaatagtttgtttgtccattagattttgatatttaacagtttcacttcttgtgctaatgtctgtaacctgtatttttaaatcaaattattcatctcattgatgcttcaaaatgtgttagcctgtatttgggcatgatagtatggggaggaaaaaagttttcccctatcctcttagggtccttggctgagtctgaaaaataaaatggtaacatcgacaggagaaaagtatagatattaatgttaaatttgacatgacttgggggccttcataaggaaatgaagacctgaagaaacagttagacttgagtgttttgagccaggtttgatgaagagtggacgttcggggagaagtgtcgttgggacagaggctctgagtggcctggaggagacttcgcctgcgtgttggagtcttctctgtatcttgggggtaaggatgctcttctcctgtaggtacaggaagggaacacccccccatgaagaccttatgacctgcttcaagggcacgagcagggggcgtcagcaagcgcccgcttctgtttcctcaaagtccatatgccaagtcctgaaccccaacctcagtcacgtatttttcatctcttctgcctccgttgccataccctttgtcatatctcagtgcgtacatgttcttcttaatttttatttgtcagagtttatcattttaaacacagatgtaatatgacgctgtgtacgtgaatgtctaatggagatgatgtctctgcaaatggaggggacgaggacctgccgcccctaggtcagacctgggttcaggacaaagagcagagggtcacattttttgtctcctgttgtatgaagccccagggcctgtatgaagagccagggcctgggaagggattccacagaatgagagaataacattttctgattctgaaggtacttgtctcgcatcagtgaagacgactgatgagaagtcatggttgtttatatgctttggctgctgctagagactttcctttttagatgactttgtaaatatttagagtttaggagaggacatttctgtcatttccatgaattgtggcagcttccccatcttatatttctgttgtataaatagttgtacagagtacacaatctgaatagcgtggatgcacagaaatagttcatcaagagctgtggttctttgagtctggtccttggaccagcagcagcagcatcaccctggaattggttagaaatgtaaattctctgacccaaccaggtactgagtcagaaagtgagtgctggaaggcagtcatccagcagcctctgccagcagcccttgagttgattttgatgatgctataggcctactatctccatcacgcctttgaatgaactctgtaatagttgatttgatacttagacacaagcagctggtttgtactttgtctagagtgtttaattgtactaacaacaacaacaaactgtggagtttggaaggattcctatagcaatataaacctttcccaccccccaataattattaagtaggtcacaactcttaagtaaaatgaaggaatctgtcagataggattttaaaattctaggaaattgttaatagttgaatctgattttcttgaaatgtcactgtcttaaaaggtcctaaattccttactgctaatctgattttcaaaaaagaaagataggatttgggagacttcttcctgtcccaatcaaaagtaagtaaaaatagaattatactgtttaagagctggaagtgactttcttatggatatcatccaaccctatcccctttctaacagatgggaaattggaggcctggaggggtgaccagcagagagcagtagccaggctagggtcttctaagctgccttgttcctgcactaaagataaggtacagttgagcatttctagcttcctgctttgagcagacctggaacacactgtctctacagtgtccattttgctaatactctagacagtggtcatttccttcagggtaattgatagaattgttttaagtgttccagaagtttagatactagaatagtgtctgtttcctgtgacatgggtttaggaaacagctgctgcagtagctgctctgaaggactgaactttgtgacgtctccttacaaactgccatgacttgtctgagttacttactctgtctgaaaaaccagtcattattctaaactactacatttgaggtaagagttatcctttattagttgcatgtaaaagaaatgtgccatttggttcttgataaatgtgtgtgcatacatgcacatactggggtgtgttggagggagggtgaagaaaagttctgtaaagtcatttcacttgctttttaaaaatatgttgactttaacatacacagaatttttttccccaaagacttattttgaggaataagggaagagctcttataatacttttgaatgtgcatagaaataatatatggtataaaataactgtaaatctgtcttggaaactgattattgatgaaggctagacagaaaactcttaaaaactgtagaaacatagggcagagaagttggtattttaaatgaatatttaaaacctaccattctaggacagtattagttaaagctctatttgtccaatctgagacaatttgcattcatttaaggtgaggcagaaggttggggagactttaaaaatagttgagtgtgccttattgtgaaaacttatttgagatagaaataaaagttaactgttaaatggtaaaaatacagaagaggtgggggtttaaaactggaaggaaatcatgtatatttttgtcttcatctaacaagtccccagttcctgtgtagaatttttctaaaactgaatgtttttctatttaaataatagcaattactgaaagtaattaagaggaagttgagccttgtttctgacagacacctactctggggagaaggagaaggaaaggagacgattccctgagcacacagtctgtgggtctcaccaaatgctggtgaggatgtcgaggcaagaggtcacccagacactggggatgggagccactctgcaaaagtttggcagttcctctcaaaaccaaaaggtgcactcattcgccatatgacccaagaattacagtcctgggtgtttatctcaaatgacttattttcttccagaagctggtacacaaacatttcatcacaacttcactcataatatccaggtgtccttcggtgggtgactagtcaaacttaactgtggtcccccccaaccatggacacagctcagcagcaaaaaggaacacgttatcaacatgagcaactgctgagacgaatcagggaaattccagctgaagaaagccaacctcagaagactatatataccacatgatttcatttatgtaacctttatgagatgatcatagatttggactggggagcagggaggggggagggaggggagggtgtgattacagagggcagcaggaggagccttgtggtaatagtaacatcctgattgtggttactcgtgagcctgcgtagagctcccctgccccgtacactcacacgcgtgcacacatgactggtgaggtctgaacaagctctgcggggtgtaccagagctgcagtggccgcggggctgcctgcagcccttggacttatggttttctccgggttgtgtgcccaggagggagttgccgggtcacacggcagctctgtttttggttctctttaagggacctccgtgcagttcccgcagcgcctgcaccgatgcccattccctttcttcgacaccctctccggcatttattgtttgtagatttcttgacgagggccattttgactggtgtgaggtagttctgatttgcattgctcattgtagttttgatttgcgttgctctaataatgagcgatgttgaacatcttttttatgtgcctcttggccatctatatgtcttctttgaagaaatggctattcaggtcttccactcattttttcattgggctgttagtttgacattgagctgtatgagctgtttgtatattttgaaaatcaatctgtcagttgcttccaggggttaaaaccgcacttctaatgcgggggcacgggtttgatctctggttgggaaataagatcctgaacgcctgctgtgcaatgcagtgggaaaaaaaaaggattttaattttattcttagttttaattatttatattgaatgaaaaatgttctcaatcttaaaaataagtagcgattgctagaattttccgtaactcatattcaattttatcgttttctcttttaacatttctgtattaaagagactcccttttaccagagaggtttgtcctggttttccttgtatcatccatttccttcttcccagcagccctgggtattttcagtcattaacacctcaccgtcttttattacttatcagctgtgttaaatggacttagttgtggaataagttgaaattgttcctgaaatgaacctgatggattttttatatttgatatattttgtgctatccttccctggtggctcagaggttaaagcatctgcctgcaatgcgggttcgatccctgggttgggaagatcccctggagaaggaaatggcaacccactctaatattcttgcctggagaatcccatggatggaggagcttggtgggctacagtccatggggtcccaaagagtcggacacgacttcactttcactttatgccccactgaaacgtataattgagaattgattatatctttgctggtaatggaatttttttttcttgttttgcgaaattatccatttgaaattgatagtggaggctagaatggaagttgcagttagataaagcttgagcaatgacctggagttgaaatcaaaggagacacgggcctgggctgataatggaattaaacgattacacctgactcctggtagaaaaacggcagcatcttttaccgtttgggttttttttgtttgtttttcttttaaatctttaggctagttgttgaagttctttaaatctttgtcaggttttcccgagtataataaatgacatcttagatgtgaacaagcggtcatttttccttgtagaaaatgttctataatttatgtcttccaatagtcattctcccaaattcaggtgatattaaacctccagatttgaaatactccctggtgttcttccatcatttctccactcccaaatgtagttgtttcttggcaaaagctgaactgataattctgaacaaacagcacaatcagaacacatttgctcaggcacctagctgggggtgaatccttagccacttagcaggacagttatctttagtatctgctgtgtgctttcgtcatgactgtcctgagtgcagagctggtgtagagtaaatgtacttagttcagtgaatctggcttagaattcagcaaagtgggagatgacaaagggagcttggggatgtttcaaataactaggaacatgtcttaaaacttaaaacagtgattattttaagtcattttaaatttgctaatccaaccatcccctacctttcgtgagggctggaatgttattagatttcattccaatatagaagacttaagataaaaactacaggacttatcattcagaaacacgagagaattggacttttgaggcagaagtcttgagaagaaagttttcaagttacgtaattatacatctatagaaaatcttaagataaaaagatactctttaatgaaaacccctttgatgatttctgcattgatctttgtttctgagctgcctattttggaaattttttttaagagttattgaactttgtttgaagtgtttgaagcatacttaatctattcgagggttgacttattctaatgcacttggcagtcttcaagcatttgagcagatagggtgatggctgaagtgaaataaatgaaaagacatcctcttgaattcccttttccctcttacaagtacactctcaattccttgcacatttaagtaagggcactgataggtgacttgttctgaagagtctgcacggggctgagagagctggggtgcctccatgagtacgggatgccgtactcatccaggtgctggtaatatttcctgtcatgtccttttcctaatagtaacgctggtcataatattagccatcagctcttggtcaatactgtgtgcctggtggttctcatgttacctcctgtttaatcctgccaacacccgtatgaaataagtttctctctccctgaggcccagcaaggcccagttaattgtagctggtactagacatccttgcttgggtttcttgggaagcagagcctgagacaaggattttgctaaaagtggtttgggaggtgatccagggatgtaggggtgagagggccaggaggaaatgttgacagagggatgcactgctggccacgactgcagccccaccaagatcctggagacatgttcagaatgcctccagagttgcccacccagtggctgggaggcagaacgcgcatgccctgactgctacctccgttcccagaaactcctgtgctaggccagcttataggccccctgagcttgagaacttgaaacatgtgagatgaaccttgagtgaagatctcgtgggtgtacggatgagctcacagagaaaccagaggtgggctaaagccggggtggtgtggcgtgcagaagcatctgctaaaaggggaagggcccgagccagccccgtgctctttccaaaccatctccctgtggggagagaggtttggggggaggaggcgcacgtcaaggtgacaggtaaattccgggagtgtgcagtgactgtcagtgagggactgcacattgtcgcctttcccttgagtacagtcgggaagatttaagttcctgttagtactggttcgcattcactgcatatatgaagatcaggatacaggaatatccagagtattctaagtgttgacgactgattaggggttaaaaatatacagcattaccaagttttcacagtctctgcatagacggtcatgttgtgcctgggagctgtgacacagtgttgagtatttatggagggaatgattaaggtccatcctgtgaggcctcagagaccactgttcactgcaaattctggtcttgctttttggttaaaatcacttggtaacaccatgtactttctcaaagagttttaattttttttatataactgacatataacattgtaggacttgaatgtacatcatgctgatttgacacattgtgttgcaccatgaggaccagtgtggagtccgctcacacctccaagttagcacaaggctctgcaagcttagccccctcagccaagtggctggttcacggccaggcgctcttctcgcagatcctggtggccacgtgcttgctgggcgtctcccgtgtgccgggccaagccgggtgaggtcaaggcagatgcacaggtggcctcatcaacgagattgaccctccaagtgggtatttacatccgttccggaaccctgaccccgatctctctgcatcctcagctgaactcgatgcagaacactcccaaaaggtcctggagatggagcagacccagcagctgaagctgaaggagcggcagaagttttttgaggaagccttccagcaggacatggagcagtacctctccacgggctacctacagatagcggagaggcgaggcaagtcggggagccccctagagggggtgcatgtggggtgctgcccccggagtggggctggggtgaggcctcagggtcttttgttactacaccagaacccaaaactggatgcgacctgccattcttgtcttgctgttgtttttgcctctccaggtaggtctagtctttcagtgaaggtaaaatttgggatacgttatttaaaaaaaaaaaaaaaaaaaaaggcaaaaagagagaaatagtagccataaatctgtagcacagactaatccctattaccatttgaaagtaagtgaaagtgaagtcactcagtcatgtctttgtgaccccatggactgtagcctatcaggcgcctccatccatggggttttccaggcaagagtgctggagtggttgccatttccttctccaggggaccttcctgacccagggatctaccccgggtctcccgcattgcaggcagatgctttaccgtctgagccaccagagaagccctttgagagtggtgtttttgtgtgtatctaatcttccttcatgctgcatggggatccttccccaacattatcaaaaagcctttccaagagtggcgtctgcatggtcaggacgcagcctagcagtttcctaattggacatttaagatccctggcctctgtaaggggcttctccggtggctcagctggtacggaatccacctgccacgcatgagaccctggttcaatccctgggttgagaagatctgctggagatgagataggctacccactccagtattcttgggcttcctggtggctcagctggtaaagaatctgcctgcaatgcaggagacttgggttcaattcctgggtcaggaagatgccctggagaagagaatggcttaaaaaaaaaaaaaaaaattggtgctgtgctatacatctagatgtgtgaatgctcgtgtctgtggaggggccggctccagagcagcaggcagtgtgaataagtgtcctgggcttcctggccttccaacccccttgcaaacccctgtgcgctaagttacttcactcgtgtccactctttgtgagcccgtggactgtagcccgccaggctcctctaggtccatggaactctccaggtaagaatactggagggttgccatgtcctcctccaggggatcttcccaacccagggatcaaacccatgtctctcatgtctcctgcactggcaggcgattctttgccactggcgccaccggggaagcccctcggcaagccctgctccctcccagatgcctctacacgcagccttcctctccttgcctggccctgttctccatatcctgccccctcattgaagcccctaattaatgttaccctcactccggtccctgtcattcaactctgtgctcctgcaggagaggttaagaatgaggaaggaaaagcatgtagagaagacactcaggtatgaatgtgtcagaggcactggaggctgtggtgtggacatagtgctttttaaattgagggaagcagtgccgtttgggtgctgatgggttaattgagctgtgccaggtcttagtcgcggcatgtgggatctagttccttgaccagggatcaaacccaggccccctgcactgggaacgtggtcttcagccactgcatcaccagggaagccccaacagtgcagatcaagtgtgggccgcctgccccgagtcccaccgtcatcttcatctattccctgtggcgtgtcctcagggtcaggcacgggtgagggacgcctccctggtctgctggggtgctgtgcctccacctcagactggcaccttatgcacaacaggctctcacgctcttctggagcttatttggttccagtgagggctctggggtctcttctcaggagggcagtgattcccatcctgagggccccaccctcagcacctcatctcaaataatcacctccctgcaaggtgtgtgtgggcaagtcactcagtcgtgtccaatctttgtgacccccatggactgcagcccaccaggctcctctgtccatggaattctgcaggccagagtactggaatgggtagccattctgttctccaggggatcttcccaacccaaggatcaaacccaggtctcctgcattgcaggcaggttctttaccagctgatccacctcccaaaggggttagggcttcacggtatgaatctgggagggagggcatgcattcagtccataagggacaaacaccacagatctgagcataatgagacagcaggcggcaaggggaggggagctacgagcagctgcgtgcaccacttagctgagctcagcactttcagggcacccgcagcagaggcagaccttgaaagtcctttcaggagctcgcgtctcgggtccacagcttgagacccacttctttagggtatgtcactaggaaagtgattacctggtcatatggcgagcatctatctagccgtagtgggtgctgtcacagtgctccccaggatacccacgtgtttacacttgcccagcgtgcatgcctgctcgctccacagctctgtcaacacttagttgtgtcagatacttaaacttttgccactctattttggttttaatttgcatttccttgactgtccatctttctactggttgtctccctaaagagtcttaccagacttttctgattatatctgtggctattctaatgtggcctttgcaaaatgcgtttattcttaatgtgaccagctgagcccacttttgtttaggaagcccttccctccatgttataagaacagtatggtgttttattccagaagttcaactgttttccatttggcacctcaagccactgccagctggtccgtgtccatcgggaaggctctcactgcagttcttcacagcagtgaccgtctccacaccattctctcctccactcacagtgtttctgaagcctcagtacattcctgaggtccttttctgttccactcttctacttatctggcctgtgttgggtgtaatttatttctgacactgtcagggacccacgctttcctgggggaagagctcaactatttttctcttatgattctagaggtttgctttgcttttgcgaatttctgatggatttgtttagattctaatcttcagatccacataccttacagtctttgcagtccttggggtcaggtttgtattttgcacccctcaggttaacttgtgcctttaatctttcttcttggtatattctctaaattttgctaagtaatagttcctgggttttttaaatttttttccatcaagatttatttgacttgtgaagttgtttagaactgttttttaaatactaaatcttattgtggctggaaaagggggtttcttctttgattcgactgaccttatggccttttagagcattttcttacatgttgtgtgtagttaagaacaagattctaggtgacaggcatgaggatctgtaggtgtacgtttcagacgacttgtaaattggcctgttcagatgtttcctattaatatccattttggattgcttaattatcagaggtacagtaaaccttccttttcccctcaattatggactccttacatttttccttgtcatgcttccatattttactttaaaaataaaaccacaaaatatatagtcacacaaatttggaattaccttcctggtgaattgcatttaaaaaaaattattaaatgctatgctttaccccaatattgcttttctttccctttcacatctattttgtttgatagtaatacagccatatcagctttctcctttaattatttgcttgctgacttcctattttcccttacattttaaatgtttctaatattttaagagtgtctcctataaacagaatgtaactagacctttatcaccagtaaaacatcttccatcttcaggaaactagaaggcacctaatgagatggtggtgaagtggccacagcaaatggtaaaggaccaggtttgccacagaacagatgatcaaatcggcttcgttactaccttttctggtgcttcctactctcctgaaaatgtttcctatgcttttcagtccagtgttttttttcctcccctttgtaagaggacagccagagaaagaaaaaagggagactctgctttcaaaactgaagaaaaaaagcccagagccaccaaggcctccccagccccagagaagacccgtgtgccccctccacttccagcagtgcccccgccttctccaggaggcagccccaaggggagcaggctcacctgccaggccagcctcgcaggcccttggatggcaccgcccagtgtgcctgtgacttctggcagccaagggtggtgcggatggcaggtgccacccgctctgccacctctggtggctgtctccgctgtcccggggtcacccccacccccagccttttacctgtgccagcggtacactgcgggccccgagacgagtagattcctacctccccacgggacaaagctctcacctcgtgccccatcccatcagcgtcatccagcccttccggctggagtaactgccctgagttaggtattatcttattcggagctttaatgtttactcacacttaagacgctgtcttcactgaacatacctccctcctgggccccccaacttccgctggtctggcctctccggagagcaggctcagggggcattttacacatctcaattttaagagatggtctttagtttacctctttgaactttccattccactgtcttctgcctcctgctgttgagaagccaccagcatttcctcatctttcctgatctgccttttctctctgatgttcaccatttcactgcagttcaggtgacggtttatctgccttgttggaacgtactttgctcctaagtctctgggatgtcagatcctgcagcaggcctcagtcatcagcctcttggaatactgatcatcctgcctccactcgcattttgaactgggaaacttctgcactttttcatacttccacttgttcatttctttgctatgtagtggagaacttatccagtcttctagtttactagcaaaacttttaacttgtgccagttttaaatttcagtgatttgtcctatttggaagttatctggctcttttcaaatgcctgtcatgatttctgacagtgttccttatctgattctaatctttaagatatttaaggccatttagattcttggggaaagattataatcacctttgtttctgctgaccctcactcagggatgtgtgtgctgtaagttctagactggactggcttttgtgtggagtttatattcctgttgagacccaggttaaagatgggtccacatccagaaatttctatctgcttgtgacaggcaccatctacttaagctacctggcttgtagttttctggatcgcagaactccagaccctggacacacccctcaccaggctcagactccttgccctgtagcgtctttatgctggtgggccgagtttttgtcttagtttgtgctttcaccgcaggaagctcttagttccaactcgccagcttgcagcagacccaaccttgatctgttgttaagatggaagacccgagaaatgtcataagggcagggaagatgccaaatggaactgtaataaagttagaggcgaccaccaccaggtgtctggcaggagtgtcagcctcttttgagttgcagctgtttagtgcagaaagggttgccttcagcacatgcaagcacatggctggggatgaacagaggatctgctggggagggtctaagaggtaacagtaaccatggttaagctagggtggatttaaagatcaaactgggacatgtcaataatacattgctccaaaatcaattttgaaggtagaaggtattttacacccagaaaacacaacgtgctaatacctaatgcagtggaaattcacccagggcaaatctaacctcctctcgtggcggtccctgcagagcccatgggcagcatgtcgtccatggaggtgaacgtggacatgctggagcagatggatctgatggatctctctgaccaggaggccctggacgtcttcctgaactctggtggtgaggagaacaccctgctgtcccccgtctcaggtaggggtgaaaagcctacacagacataatcacaatcactcttagcaccatgatttccctctggctcggtgagatgccgtgtgctaagctgttccactgtcccccagggtctggcgtcacagacctggacacacaacacactggcggtcgcagccatggatttctcaaaggttctcagtgcttttcccagatacggaaacggagtttttcttaaaattgcgtttttattttctcctctgtctgcaaagtctgacttgggtttgtgtggttaagcactagattttggggaggtggaggtctgtgtggctccccgccctccccattcagtagatggtatctgatgctgggggcaaggccaaggcgtgagttcagccgtcagcttatgttttaaaaaactagcggcaatcctgggggcatattctctccatttaataacttaccataatctcacgttcatttagatctttactggtgctccagcactatacctggtctctctaaatttcagaccatttctcctgggtgggtgggctttgaggctgtcgtcatggagaacatgtgtttcttccatgctccgaaagacaggaaggccagcccctcacagcacctgcctcctacctggtggtcccacaccaagggctccatgtcctcagtcaggcctgggggcttccccttgacctgtgtttccaacagagcagctccttcctcccctccccagtggcaggaaaagactcctatcacctgtgtgaggttttggttcctgtaagaggctccacaagcgtttttctcgtaaggtccatttccttgaaattagttcagagaccataaagaggtaaacctggcttgtcaaggttatgaggaacgcaagttgcacctgcagaacttgccattgggtcttcagcatggtgtcatcggaggctgtgggaagggttcggggacagaagggtcagctggagccccaggtggcctcggggaaccaccgagctcagcaccatctacaagagcttcctgcacatcgcggaaacagagaacttccaccccctggattcgctgcaagttcaaacgcgcgtcgtggccagtaacgctgagatgcaggacttccgtgacgggctctcctctgctctcccccccagggcctgaggcaagccccagtcaggatgcagtcactctccaggtgcccactccctcccagtccccagccacaccaccttcctcatcctcacctggtaccggcccggcctcccgagaccccagtgaaggcggggagtcgcccgtggtccagtctgacgaggagggcgtggaggtggacaccacccttgccaccttacacactgacgacagcgactcctaagcccgggcacctgcgcgccaaccaccttgaaggacaatgcagcgtgcacagaggcccgtggtgaaggcgggtggacttggggggggggggggctcttggtttttacacaattgacaataacgtgaggcgggggctcttggtttttacacaattgacaataacgtgaggcaagtgactgcaacagctaacaataaagtctgagaactttaaacgtagccagtttgtacagaaaggctgctaaatacacatgccctgcaggtggggccagggagcttggcatccacagcagctcggcgctggcgagctaagccccttgcaggtaggaaatcgggcctcctctcagctctaacagagttcgggcagaatggtcaagtccaacaacagtccctagtttatttaatagcacagcacacctgggcacaggaggcaaaaggaaacaggggcccagtccccacgccgtttcgctcctcaccagaccccggtcccagaggggtgtgtttcccccaccaccactcaccactgccaggaaatgagattaaaactcggtgttcacaccactccctggccaaggggatgtacccttagccctttgatcagtaaagagctgatttcattcactcatcttccacaagacaaacaggtgtccaaaaaactttgttttattattaaaccttgtagtacaaacctgaaaagtaaacaaaaaactggcaataaa

SEQ ID NO: 165 - DNA, 32629 bp, Hippotragus leucophaeus
  source 1..32629: mol_type = genomic DNA
aaccataggaaatacaatttccaataaaggtaagggtttggtgagtcaaattctgttcaaattgcttcacatgtattaaatcacatgatccttctaattatccaaggtcagttaacgccagagccaagattaaaattcagtttagttccagagcttatacttaatcactgttttacagctttttccgttaggcaaataaaacaataatcatcactgaaaaaagataaggtgtaattttattactttcaacactgcatcacaatgaataaaacaaactaaagtaacacacagctttacaaaaataaatttttattaaaagcagtagagtctgagcaggagacagtacaaagagtgtaaacagtgtaaacatcactacattcagctcagcctgattgaatgctgacagacaactctaaatgctctatgtgcccttactagcaggatacattagttctattgtacacagaaaacacacgctgattttgattgggaaaagtactttatcgcagtcggtcccagcgccaaatgctggcatcatcacaaacagctataagaatgctgctgtccctgctgaaactggtttgtcgaatagcagccccacacttgtgatgagtcagcgttgtgcatctaggaagaaaacatgacaacaggttaaatatcacacacacacaatgctgtcagtatcaaacttaaaaatagtgaatgtaacttactaccaaagtactcaggaaaaataattattattagaataaaaaagaaataattcacaacatgctgagaatgtaaatgttacaaaaggtgttaaggatggcactgtaggaatcaatcacttactctatagtgacaacatgctggaggaaaagtcagaaattatgaagaggaatctctagatacttacttggctttatgaggatcttctacttctaaatcccaaacataaagtttgccaacttgattgcccagtgcaagcatctgtataaacatattttaaaaacccatcaaaaacaaaacaaaaacctatcaaattattaatataagctataaagatttcaagcaatccaaagatagctttcttattgcagaaaaatctcagctccaccctatggcaatgctcttggttatttctttgcatcttatatttatgatttgtaaatgaagataagagcaactaatgcttcacaaaggtgtcctgaataaattaagccattttgcaaatttttgaagaactatacaatatacacaattagcatatattcttcattctgccttaaagaactataataaaagccacagaaaatttccaaagctttcatatagaaagaaataaccaagtaatgtgttaccataaaattctaataataccaaacttctgtaaaattttagataactaatattttgtctctatcttccatgttggttttctatataagatgaacattctaatcaccaaaacattaaatcttagtaacagatgttatcgaaagtaaacatctaactgccaccattgacacctgtcaatttcatctataataagcattgcagatggtgtgcagagccacaagggtagaataaataacatcaaaggccaaagcaaataatacaaaaaatcaaggtagattacacttaaagaggaaagagaacacagatgcactcagataaaactaaaactgcatcgttttaagtcaaatactttcaaaatgtaaattatgttgctaccttttgccagaaatccatagaaaacctcatgtaccaaatgtcacactggctgtaatcaaatcgcccaagaatagtcacattagactcactgggtttaattttatctatatcatcttccattttgccaggtttccagcatacaatggcattttcacaagactttaaaaaaagacacgagataaaaaagaaatgttaattgtagaactgaattttaaacattataaacaaagctttttctcaactgtcatttcagaattcacagctctttaaacctggttatccctcaactgagtccaatgatacacatattcatttgtatttgcagaatcagtatctacacttacagattatcaagattttaacaatacaaaagcattacactatctagaatattcatttttgaagttacaacttctcttccaaaccaagtttcagccttagatactttagcatacagagacttaagtatttcacagcgaagataaagttattagaatacacggttcttcaatacggcccctgctaattccatctttccctatttcacttccaatttcctgcggttccaatctcctgtggttccctttatacagttacctattaatcctttatctgcagtatctgtactacatggtaggtactcaacagatgtaggaaagctaatgaatttatagaagggccttacagatcagattatacagaaggcaataaaagcagttactcagtatcctgacactggtaagaggacgggagtgaaatcggctgagttacaccttgtctgtgctgcaacagtgaagtctttacatacattctactttaggaacaagcggtgaagaatgcaatgggagaagaaagtgcaacacagagggcactgtttatattactgtgtaggctagtggtttgccagttaagggatcttcggcaatgtctctggcttccagttaagagaggccagagaatgctgtacactgtaaagtagagaatggctcctcccacaaaaaagaactgtctgacctcattatctcagacccaggaccgagaaatcctggtggaggtgaagggtgcttactgacattttacaggacacattccacacaaccacatatggtagccctgtggggttcactggcatttcaatggtttaacagcacagtcatagggagataagagagtgaagaacatgttttcttcttctctgccttttttagattatataaaaccccagggttgcagatccattacacaagttctttattgtaaagtaccttagagagcacccagtctggtgactcttttaaatgcacagttggattgacagcctgtagagctttctttaaaaacacatcttggccccaaccccactgaatcacaatttctgagagaggaggccaaagcagcagaattgtaacatagctcttcaagtgcttcttactgactgtactggcaaaggacccttagtcagtagagtcccgtcacagagagctaaagcatagggaggtaaagagtctacccacactaatggatgcctgtacttgaaagtcatccagagagtttctaacaattacaaatccgcaggtccctgtgccagatgtagaatacatggggatgaagcttaggaatctgttttacaatgtcctcccagtagttctgatgtggagccagatttgagaccacaatactcagttcagcctcttacctaaaatgcagaaatcttttcctatcatctgattaagttctaagagcagaaattttagacctactgcctttttacatctgcttccagcaaccaatgaagtagaggtacttttccctattcatctcactgaatacaacttagaagtttgaagggcagggaggaggcagaccggtgaaggaccctgggacatgaggggcactgagttctttggttttcttttgcctcctttctgtatcccagactgcatgctagagaaggcagtgactcaacaaagttaaagacaaaacaaagacccccaaagcctactctctccaaaggaccaggaagtggcaacccagcgtgagagaaaatcttcaggtaaacaataccacagaaaaaactgtggacccacccacacatgaaccagcaaagtcccagtggggatcccttctcacaggtggtaactaaacacttcaagtacagaataccctgctgactcctccctacccctcatagtaatgacgtgactcctcctcctctctggctggggttgtattagaggcggcgtagcaaagagtcaagagaagtgggcgacagaggatgagatggttggatggcatcactgactcaatggacatgagtttgagcgagctccgagaactggtgatggacagggaggcctggcgtgctgcagtccatggggtcgcaaagagtcagatacgactgagcgactgaactgactgactaaactgagcagagagccaggatgttcacaaccacctaccacagtgtcagcagagaccacccagggagcagtcatgagggctccaaacccctccctgctagggtggtgtcagcagagtccccgtgaaaagcctgaactcctgccccacagaaaagagacatcaccaccaagtcaaccaagtggggaatgtcccctgccacctgccaatcatgaagcagcattcactttacagctgaaaatgtatcaaaggaagcctgctgtaagagagctaaataacagcccaagtttcctaacagtacccaatatatccatatctccgtcaaaattcatttgtcataccaagaaatgtaaaatctcaactttaatgagaaatgataacaagagacacaaacaatgagatgacacagatgttacaactgtctgacaaggattttaaagcaaagagtcggacacgactgagcgactgaactgaactcatcataaaaatgcttcacccaaatacaaaattaaaagttcaaatctggaaaaaaatggttcagtaagaaattacaaacacacttagaatacagtctcagcagagaaaagaaccatgtggaaattttagaactaaaaatactataatcaaaataaagaacaactgctcaccagcagaagagagatgagagtagtaaattcaaagttagaacatagaaattacccaatttgaacaagacttgaacaaagaagttaccaactgaacaaagaaaaacagacttattaaatgacagtctcatggaccaaacgaaaaatctaaagtaccattagaggagagcagggagaaaggggggggatacaaaagaatttgagtaatggctgaaaaaatccccatatttgggacgaattatgtcccctaaagacctacagattcaagacagtaaatgaactcctcaaagacatcaatatcaagcagagcacagtcaaacttctgaaaactaaaactaaaggagaaaaaaaaaaatccccaaagcagttaagtcagaaagaataccttagctataaggaaaaaccaattccaatggtggcagatgtctcattacaaataacagagaccagaaagagggggaacaacattgttcaaatgtttaaagaaagaactgtgaacacaaaatcctctattcagtgaatatacccttcaggaataaacgggaaatgaggacatccctaaactaagaaaaactaaaagaatctgtcaacattctaaatcaatagctacagaatgttctaagaacagaaaggaaatgataaaaggaaccttggaatattagaaaggaggaatgaacgacagaaaaagcaaaatgagtaaacacaaaattctcctttccttcaagtttttaaattctgcttgatggttcaagcaaaattgtaatattatttaacgaagttctcaattgttaaggaaatatttaaaacaattataagtgcaggacaaagtgggagataagctccctatactgcatttgaagtggtaaaaggctaatatactgatgatcacatacatatattgcaactcccagagcaaatataagaacaaaacaaactacacaaagaaatatacttagaggtagtacagagaaatcaaactggaattttaaaatatgtgcatataacctacaggaacttaggggagaaaacccagagaaatgcaaaaaaaaagaggccagacaagtaacaattgaaaagttaaggctcaaatataaacagtctaaatttacaagctaaaacagtttctcaaagtgaaataaaaaacagtatgacccaactgtatgttgtaagaaactcacttcaaatgtaagaatacacgtagattaaaggtgaagggtttgaaatagctataccatgtaaataagcattaattaaaggaaagaaagaacagctatactatactataagataccatacagatatactataagataaaaggagacatcaaagcaaaaaaatctaccagagatagagatggaccttccacaatgacagaagggtcaagctaccaagaaaaagcaatactaaatgtgtatatgctaaccaacagagctgcaatatgtcacagaactgaaggagaaagggaaaaattcatgattatagttgaagacttcagcacttaagagcagacagacatcaacaaagacacagaagaattcaaccacattcaaccaataggatcttggagaaggaaatggcaacctactccactgttcttgcctggagaatcccagggatggggaagcctggtgggctgccatctatggggtcgcacagagtcttacacaactgaagcgacctggcagcagcagcagcaacaaccaataggatctagctgacatttacagaacactccacccaacaatagaatacacgttcttttcaatggaacatacccaaaacagggtcataaaacaaatctgaaaaattttaaagaatcaaaatcataaagaatatatactgactgaccaaaatggaatcaaactagaatcagtaaaagaaagataatgaaaattttccaacacttaaaaaactaaatgggcttccctagtagcttagtcagtaaaaaatctgcctgcactacaggagacccaggttcaatccctgggttgggaagatcacatcccccgaagaagagaatggcaacccactccagtactcttacctggaaaatcctatggacagaggaccctggcaggctacatacagtccatggggtcgcaaagagtcggacatgacttagtgactaaatcactaccaaaaactaaatagcacattgcatatcaaaatttttgtgagaagcagctaaagcagtgctgactgggaaatttacagcaccaagagcttacattagaaaagtcttgactaaataatctaagctccccaaactagcaaacagaaaaccaaaatacactcacaggaaactaaataaaggagacagagggtaacaaaataattttgacaaactcctaaaaagactgacaaaagagaagatataaattactgatttcaggaatgaaacaggggctatcactaaagaccttgcagatatcaaaaggataataagagaatattcaaacagctctccacacataaattttatattagatgggatggatcaattcctgaaatagcacaaactaccacttccctggtggctcagacggttaagcgtctgtctacaacgtgcgagacccgggttcgatccctgggtcgggaagatcccctggagaaggaaatggcaatccactccagtactattgcctggaaaaacccatggacagaggagcctggtaggctacagcccatggggtcgcaaggagtcggacacgactgagcgactttaccttaccacaactcacccaatatgaaacttcattcaaacaaccttttcacttttaaggaaatcaagtttttaatttttaaattcctcctcaaaaatttttaggcccaaatgccagtattattgatatcaaaaccagacaaagataagtaacaaaactttagatcaatattatatctcattaatacacataaaattcttaaaacaaaatattagcaaacagaattcagcaacatataaaaagaattataaagcatgaccaagtaaacttattcaaaaacaatcagcacagtccattgcattaacaggctaaaatagaaaaaaccatgatcattatcaattgatgctgaaaaagcatttgacaaacttcaacacctattcatgataaaactctgaaaaatttaggcaaaagaacaactctcaattggatatagaacatctacaaaaatcatacagctaggacttccatggtggtccagagtgtttggcaatacaggggacattggtttaatccctagcgggggaactaaaatcccacatgctgcagggcaactatgcccacgcaccacaaccagagagcccatgtgtacgaggaaagatcctgaatgaggtgacgaaggtcccgagtgccgctactaagacctgacacagtccaaaaataagtaccagaaaagaatcatacagctgatacgtataattgcaaaagactgaattctttccccctttaacatcagaaacaagcctaggaagtctgctcttaacacattactgaccagagacattaatatatcttttgttacctgaatgctattgattggagatgtatcaatatgtttttagagtgatacaatcaatatcaccatgtgaagttgttaagagcttaaattgcaccaagggttcatcatacaacttatgactgtcattatcacttacattttgttccatcaggcttttgttccaactctgtgtatattataaacataaaattttcagaagtgacatgtcacgaaattttgaggaagaatttttcagtgaattttatgcggatacgttctatgtctaagtgacatatatactagtgtctcagaagatgatagttcttcagaacttagttaattcagatgatgtgaatatcagaccaacaaaaaatcttagtgattgattctgatacaaagagaaaatgcaatagtgctggagactgctcctgtacttctacagaaaggtggattgaagacaacatttcacaaaaattggaggaattacaggtatgtcaggtgtaactgactacaggcacctgtacagtgttagtgaaataacagaactaatttttgaccggtcaaaataaatatcaccagccacaggagttagtttctgcaaaaatcccccagtcattaatgagttaacactgctattcaatgtagcaccagaaacttgtcaatgagatgagacgaaaaatggaaagttcttttaaaattcagttcagaaaggaagggtacaaaaactgtccttatttagagatgaaatgatttacgtagaaaatcccaagtaattagccaaaaaaaaaaaacaccccacaaaccacccttcttgaattataagtgttaaaatagataggattcaagattaatagacaaaaataaatttatttctatatattagcaatgaacacaaagagatggaaatcagaaataccatttattatagtcactcaaaaaagagacatacttaaggtatacatctaacaaaataggtagaggacttgcatgctcaaaactacaaaatgctggggattccctggtggctcagtggtgaagaatccatctgccaatgcaggagacatggcttcgatccctgatcgaggaaaatcccacatgccacagagcaactgagcccatactctgcagttatggagcctgtgctctgcaacaagagaagccactgcaatgggaagcccatgcaccaccacgagagagcggccccgctcgccacaacgagaggaaagcctatgcagcagcaaaccccaccacagccaaaatcaaaataaaaagttatacttaaaaaaacctacaaaatgctgataaaaaatcaaaggaggtctaaataaatgaacagacataccagtcaaggacaagaaaactaggcagagtagatattaattatccaccaaactgatgcacaggtttaacacaattccaattaaaatgttccttacccccaaagaaattccagcaagattttcagtaaatgtagacaagataattctagaccttatacagaaaggcaaaggaactagacgaaaataattttaaaaaagaataaagtggaaggaattactctaccaattccaagacttattacagagctagagtaatctagcttgtgtatgtagtgctggtagagggaacagaacagaataaccagaaacagcctcatacaagcatggccaaacaattctgaaaaaagtgcaaaagcaattcaaaggaggaaagataggctttcaacaaatggcactgaaacaactggataaactataggcaaaaaatgaactttttacctaaatgtcatacaaaaactaacttaaaatggaccataaatttaatataaaacattataaaaaacttttgaaggaaacacaagggaaaatctttaggatccagggcttagtgaagagtgtttcaaaataaaagcaaaagcattatccataaaaaaaaataattaaaaaaaaatcaataaattgaactttatcaaaattgaaaatatttgctctgcaaaagaccttgttaagagaatgaaaagacaacctacagactggaagagaaaatttgcaaactacttatctgacataggatttagaacatatgaagaactttcaaaactcaacagtaaaaaaacaaaacaaatccaattagaaaatgagcagagatacgaagagacatcattgaaaggatatgtggatggtaaataagcacataaaaagatgatcaacaccactaaccatcagggaaatgtaaattaagaccatgatgatgtatcactacacacctatcagaacagctagaataaaaaatagtgacgataccaaatgctggcgaagattcgaagacactgcatctttcatacattgctggtgggaatgtaaaatggcacggccactctggaaaatagtttggcaggttcttaaaaaactaaacaaacgtaaccatgacccagcaattgcccttctaggcatttatcccagagaagtgaaaacttacgtaagtccacacaaaaacctacacacgactgttcaatagcagctttatttgtaacaggccaaaaactggaaaggaccaaaatgtcctacaatagatgaataaggttaaataaactgtggtacatccacaccatgggtactatttagcaactaaaagggagacctactgatatatacagcttggatggcattacactgagtgaaaaataatcttaaaaggtctcatacagaaacattcttgaaatgacaaaatcacatgcgataaaataacctacagctacacatacactgacaatgtcagtttcctggatttgatactgtatatataaggtgtaaccaatgggacaaactgggtgaagggcaatgtgaaacctctctaaactgactttgaaacttcctgtgaatttaatctcaaaatcaaaggttaaaaaataaaaaaagtaaaactataccttcattggtaaggaaaaaataaataatcaggctctacccaagaaaaagtgaaatgccctgaaacctataccaagaagaaactggatagcaatttgttcaaatctgacaatcctaaacgttcagatgacatcaccaccaaattccctaaattatcagtagaaaaaatatgtatcaacatactagagcaggggctggcaaactagagcccatgagccaactccatctgtttgtttttgtacatgtaagttcactaaaatggacacgaacattaaaaacaaaaaccaaaaaaaaaccctactactggctttagacattggtaattttacagttaacactgcatatcagagaatatcatcttgcaagttaacattttttttcttactggagcaacaaattatagttcatcagaatgttttatgcctaaaataagtttctgaattttcaaagtatcatgagacttaaaaaaaaaaaagcaatttcccatctgttacacaatttatcaagtgcataaaaaactgtgctccctgcagagttccaactcacacaaacaatgaaattcagcttaacagcagttaccataccttggaaagtatcaaatcacctaaccatcgcacacaatcgacataatttctatgtatgtctctggtagaaaagtcagggaaatgaattttctgggaaataaatggcctgaaatggaaatatcaaaagtttagagaaaaatgtgtagcagaagctaattttctttttaggatttataaaactctgaaaagaaaaacagatgagtattagttcatctgtgttcctataaaactaaataccttctgatctgtttattgggaactaaaatctctttctgtttttgtttctacattttactccattattagcttaaaactgaagtttgtattcatcctatcaaatttcatttataaaaactgaaacttcctgccttactatatatagaccaaaatcaattacttaaattctggctatcctaaccaataacaaaagacatctgcttagagctgaaattttctcatagaaaatgctaagctaccaactcaatcctttcatattaacaatggtctatgaaagttaacacacctaccttatttcaaaagatagtcatctttcagaaacaatgacacatttcaaagtctggtaaagataaagttagtgagaatcctgcctagaacaacaatttctgaagatgatctgacaggaatttgacatttattagttagaacttttcctgtatttagaaaagtaaaacatggcacaatttttccttaaagatgtttgtgacaaaatcataagctagagaagttgctaccaattcttcagttaattaatgtatacctaacatttctaatctagtaagtgattccgtttttaaagtgaagtaactgaagaagtatcatatatcatgaattagttgtatcttgggcacaagtcttctccttggctttttcctcatacataaaaaggatattgggctcaatcatttcaaatacattttccaattcaaattgtgggatccttttttcacctttttttggtggctcacaggatctcagttccccagccagggactaaactagggccacagcagtgaaagcctggaatcctaacccctcagctcaggaaactcccagatcttttctttattaaaacattaaaatgttattaatgacttgatataaattcttaactgcaatagcttaattgctttttatccaaatatgtattataatctacggttaaacctctttcaagaagaccagcataattcactgttactttctgtaagctgtaaaatacaacaacttctatttattccagagctctagaaaatacaaaaacataaatttaatattgtactaacccctggtgttttagaacagaatttaaaagctgtgccaattcttaagaggcctgagatgtgatgactgtcactgtaattaaaatatttacttatggttacaaattcaactaacaatctactcataatgtgggtcgataaccagggaattaactgctaaaatgaaaagagcaaacaaagttaacatttacaaacacaggatagtcatagtgaaagagtaaatagcttgataagattctgaaaaagatagttaaattaattaagaactgaggtttttcaaaatagtgagtatcatttaaaggagagcgtctgtcatgaattaaagctaagaaccccactgaaaaaattatgacttactgtctttaattagaatttacagtgctgacaagcagtgctaataaacattagcacatatgtacctaaaaaaaatatgtgaaatgggctactaaattaagataaaaatacaacagaaagggattttgaaaaatgagccacaaacataattagataaaataaaggttttcatttaaattcaatgagttttatggcatataaattataccttaaagttattaaaagagggggttctcaactcaatactggagacttatataacaatttttgaaaaagtaaaacactatttaaaggcataagatagcacattgttttaaatactacagctgttacctgttagttttatttgggttataatcataagattccttaatagcattcatcattctctttgaattgatcctccaaagtttaagagagtgatccataccacaagacattattttttcacccaaaagatcataatcctgtatataaaacagaaaagctttaattaaatatgtacattatttccccaaattatgctcattttcatctcatgtccagtactgtgaaaattgtatttcaaaccacaacactaacattttgtgtttcatatatatagggcataagtcacaaagtttttaccactttcaagatttagttttaactgacttgttatcaccacaatatatgagcttatgcaatatggcagataagaagtaaactctcttaatttagttttatctattcaattatctttagccaaatatttcctttgtttgattttgaaggtgaacctaatgctgaggtaaaacaataaaaacctgaatggttgttatttttctttgtccaacccagatgaagcaatgaaactggttatctgcatgtgaaattaggagtcctttaaacaactgaaatttacttgtacatctaagccaaaatacttagataagtggggtaccttggttttagagttcactttttaaatgaataaagaaaaataggtcttaaaaaggaagcaacatttcctcacttgctgtttacttttaatgagctcctaacagatcatctattgtaacaaccttatccacatcatttcacagatcagacactaaggctcagagatcagttcctttagcacatggtacatgtgtcaatgacaacctcacacatcaatccttctagcagtgagctcctattggtacaaaagagatacaaactaacccctgctttcattctaagaaataatagtagagagttctatttaaggagagtactttcctcactaatctggatagtctatgttaatccaacctttggatcaatcatgaacacagttttacaaaagcctgagagcttcaggtttggtgtttattgatttcagaagtctggcagctgctacttttcctaataacctcactgtcaatagcaacaagacacctctagagccaggagctctcattcagtttttaaggaaggacagtagtctttgttttttcacacataaagccagatggaattctgcaagttctagaaaatcctttaaggtaggtatgattctcacaaaagcataggaatatttagtacctccaattaaaatatcacatgcttcaaaatataatgccctttaaaaatagtttaaaaaaaacaaactgaagagctgtaagactactaaataagtaagctacacacagaaggtaaataaacctaaacaacacaaaatctgaaacttaactaaaaacacttaatatcactacaacagatcaacagactgtaatacaaagcataaagacaacaccatgccatcaaaaggaagttatctaaaagtcagtgtgaacaatacctcctagaaatgagtaacttatatttcaacttcaaataaaaggtgaaaaaatttcttaattgccaagtaggttaaccttttcctttaataactgagaaacaacaaaaagtaacttggtgattttagattaaaaaaggaaaagaacaagttcacagaattttctcatgagaatccaggtgctggtaaaacatgtgcaagagtacagataaaacacaaagagcctacttgctttatctcttcatctttaagttaaaaccttatctgtcagagtaaatgaaataactgcctgccaagctacatgaaacaaactacacgctttcttgtagggattgttcacagctttgtaacccgaaggtcactaccctgtagctttcaacttacagcacttagaacttcatctctgtgcccttctacacctccaaatattgccaccagagtgtccgtttggatattccataatcgtaaagcatgatctagtacagacataaaaaaattaacataaacttttatcattcatttactgtggacttttaatatctctttaaagaaaaaactaccaaagtttggacttaattcatgcacagtaatgactaagaaggaatccatatcgtataggaacttaaaatatttatattacttgtagatttaactaggtatgagttcaaactttcaagggtactaggttttccctctaccatacccacatttacaaattgaagaggacaaagtagacttataagatctctacagtaaatctaaaaatatgattgaaacatacacatattgggacattatttagagtattctggacctttcaaaaattctaaaactgtaatctgagcaatctcattttccactgaacatcagcaacaaaataaatagaaagcaatattcataaataccaagcagagtttgaaatataacaatgtctatactgtgtaatattaacatattatacaacatattgttagtagtggaaataaacattgctacaaaaatgatgtctttttgtagcaatttcaatctgcatccaagtctttgtgcagacatttacatttctcttgaagatacatgtacctaggagtgtaattctatgtttagctttttaaggaactgccagattgtttttcaatgtgcttacacattttacattcctaccagcaatggatgaaggggttccatattttactgtctttttcactgcaatcatcctagtaggtgtgaagtggtatctcactgtatttttgatttgcatttccctaatgattaacaatacccactccagtgttcctgcctggagaatcccagggacgggggagcctggtgggctgccgtttatggggtcacacagagtcagacacaactgaagcgacttagcagcagcagcaatgattaacaatgagtgcttttccaggtgcttatcggacattcttgcctattctttcaaaagatgtctacttttaaagcctttgtttgcttttaatttgattgtatttttattactgaactgcatgacctcttgatttaagtcccttattagatacacactttgcatatctttttttcccctgtaagttgtcttttcctttcttgagagttttacttgcagaaaaattcctgttcattttgaaaagctgtttgaaaatgctctaacacaatgggggaagagcaagattaagaaactgtgatattaagaacaagtaaggcattatggtctatgttacctgtaaaagaatatctgagcccagttactgttattaacagaagagaaaaagttatcagctctcttcttaggtgtctatttccaaacaagccttgacagttgaaaaatcacattgaaatatttttcatttaagagttttaatttgaggatatcttttaatatgggggttaggttataggtgtgatagctgttaagaatacatttgactagaataataatgtagaaatgaaaagagaaagggcgataaaaaacagaatgtagaaataagaacaattcaaatcactttagagagctcagaaatttaagaatgattcagaggcctgtctgaacccaaaataaagttacaatgccaacataggcatacagagcaagacaatgctttctctttgcaaggaaggaaaacatttagaagagcttacgctggataacttagcattttaaggaatcctgtaaggaatcttttataaaatagaagctttatagagagagaggcaaaaaaaagcatcatggattttcagatacactatttcttattacatggttggaaagcatcagagatttgctagactaccttccaactattaaaaatgttgcaacttcagtgacctgccattaaaatagtttagtatgataattcaattgaggataaagttctagaacaatcataatgcaatatggtaaataagggtaacacacacctaatcctcagtgtcaattatcttatctacatcttacaggaacagtgtacttcatggtcccattctccagttcttggtttggggatgctaatgtagcccaaaatttttctaaaacttatttctttttaaatttgcaaatttcccttagattagtttgtcccgaagtcaaacaaaacaaaacaaaaaacccaactcactcccaaataaatactactatacaaggaaattatttgtttcttttacctttacttactgacaggagaagatttggatctcttgggtggaatttcagctcattgatagcatttccatggccaacatagtgctataataaatttaagacacttcaactttcatataaaaatcaataaattcattttcattaatcttcaaagaatggaaaaataatttcacttgaagtagtagttctcaacattggctgcatattaaaatcacccagcttgaaggaaaaataagtgatgctgaagtcccatttgcagatattctgagccacagcaaggatttaaaagattctcaggtgattctaatgtgcccccagggttaaagtgatttgtaaaatttcttttagtatcaacttccaaggcttcactttttaattctttacaaagtatccttgactccatactcctatttaggggttcttgaaaaatgaactcactctttagttattgttcatttagagcttctcaggataaagcaaaagaacaaaaatgatttcaacagaaaacagtgcaaatgataaaattttcccatttattccttaatttgcatgatccaaatgtgacaaaggtctcaaaagacttgtctaaagaaagcaacaggcaaagtacaaaccaaactaaaaactgcacagaaactgactccgttttaaattcaacatggcaagtttttacaggtgtgcatacaaaagcagatctacagtttaacaagaaaacccacctttatgcactgcattgttatgggattaattatcctaattatgcctctagatccagcaacagccagcagaggatggcttgtattactatcatatgtccacgcacacgtgtaaaagttttcatcagcctaagaaatcccagttaagaaatataatttgtttttgaaaaggaaacacgtcaatgatcacaataatgttcaaagaattgctgaagctcttgacaaagaagttcccattcttctttataccatcagggttgaaacaatgaagattttaggtctaaaatctataccaagtgatcaaacaaacccaatccttccactcaattttgattactattttgctgtttgcacaactgtttacctgtcttttgaaagcagccacagccaatatgtaaatgaataggcataggttgtatcctccccaaaatttatctataaaaacaggtttctgggggaagggatagtcaaggactttgggaagatcatgtacacactgctgtatctaaaatgcataaccaacaaaaacccttgtatagcacatggaactgtcaatattatgtgccagcctggatgagagtgaggtttgggggagaatggatacatgtatgtgcatggctgagtcccttcactgttcaccagaaactatcacaactgttaatcggctatttcctaatacaaaatgttcttggtattaagaataaataattaaaattaaaaaaacaaaaccaaaaccaggtgaccagttccacaacctataatttactgaccctggctctatctcaataactccatgtgcctctagataaaaatcagctaactattcagttttccaccttttcctatgtgagacttttccaataatgccaaaggtcaccttccttatcacctaagggaagactaaaatgttctttttcttacttgctaggtttttcaaatggatctggaagaaatcttatcaccaagctttgactgttgtatcctttggctttttaaagctttcttttctttataaacccatgttttataatatttcatttcctaaataaacatgcttattttttttccctgtaggctctgctgaccaaatacttgatataactgtcagcacagcttctgatcaacccaaattcaccaatatccttgccctgaaatgataaaaatctaagcaaggtcaaagaaacagcaagttttaactactttctgctataactttctattattggatttccagtgctcatctctagccacctgtaccgtccgccctcatatccaccctgacagtgcctttccgggatcaggaaaatgagataccaagaatctcttgggtaacagtgaaggaatagcattggataaagttaagaaagtaaggtacaaaagttttgaggtacttattcaaagtcaatttctttagccaatgataccaaaaacccaggaaaggatacatcagcatccacataagactgcaacaaccggatttctccttgtgaatgacattcatataaggtaacctaatgaaaacaaaaatacagcaaagtttatctcaaacacagaaacacactcttcagcttttgaacatactttattttagtgtgcagtacagtaaaaaaaaacttttttaaaataacttaaataatacagaaaactatttaaaaagaactcctttaaatttaaggaaaccatcataaactctaatgcattacataatttccagagtatattaaacactgtagtaataataatggtttctatttctgatgttttcaacttattcatataactggaccaattcttccaagtaaatagagttgagtacctcacagtaaagtatgctgttgctaagtcgcttcagtcatgtccgactctgtgcgaccccacagacggcagcccaccaggctcccccatccctgggattctccaggcaagagtactggagtgggttgccatttccttctccaatgcatgaaagtgaaaagtgaaagtgaagtcgctcagtcgtgtctgaccctcagcaaccccatggactgcagccttcaaggctcctccgtccaggggttttccaggcaaaagtactggagtggggtgccattgccttctcccacagtaaagtagaactacttcctaaaactgtggtttatcctttttttttttttcagttgtgccatatggcttgcaagatcccagttccctgaccagggactgaacttaggcccacagcagtgaaagtgcacagttccaaccactggacctccagggaattcctgtggcttaacctctttaaagtctttgggtagttttagagcattcattaattacataaaagaaaatctaaaatttgcctcatgaacattgctcatcaaatattaactttctgttgtacagtggccctttccatttatcattttctaaaataacatattcactttactcaattatgtacagttgtccctcagtatctgcaaggggataggttccaggacacccacagataacaaaatctgagactgctcaagttcctcatataaaatagcatagtatttgcatataacctcacacatcctccagtatactttatctttagactactcctgctgctgctgctgctgctaagtcgcttcagttgtgtccgtctctgtgcgaccccatagacggcaggccacgaggcttccccatccctggggttctccaggcaagaacactggagtgggttgccatttccttctccaatgcatgaaagtgaaaagtgaaagggaagttgctcagtcctgtctgactctgcgaccccatggactgcagcctaccaggctcctctgtccatgggattttccaagcaaaagtaccggagtgggtttgcactgccttctcctaatacaatgcaaatgctatgaaaataaaggtgccagcacaaagcaaattcaagttttgcttttttggaactttctggaattttcttttctgaatattctcgatccatagttggctgaatctgtggatgtggaaccccaaagatacagagggcttactctgtaatactaacattttttaaaacactttttgatgtggaccattgtctttactgaatttttttacaatattgcttgttttatgttttggtttttcggccccaaagcatgtgggatcttagctccccaaccagggacagaatttgcaccctctgcattggaaggcaaagtcttaaccactggatcgctagggaagttcctgtaaaactacatttttaaaactctttccagttttttacagtttagtcatgttagcaatactgttactaattttaatacgtctctaagaactctataaaaatcctttaaaatacctattaataagataacctacattaatattctaaaaacatattctttatatggacattaactaagttatgtctttacaaagtattttgctttatttttcttaaaaaaaaaaaaaaagaggtccaaatagcagttcagttcagttcagtcgctcagtcatgtccgactctttgcaacccgatgaattgcagcacgccaaaagttggcttaaagctcaacattcagaaaacgaagatcatggcatctggtcccatcacttcacagcaaatagatggggaaacagggaaacagtgtcagactttatttttgggggctccaaaatcactgcagatggtgactgcagccatgaaattaaaagacacttactccttggaaggaaagctataatcaccctagataacatattcaaaagcagagactttactttgccgactaaggtccatctagtcaaggctatggtttttcctatggtcatgtatggatgtgagagttggactgtgaagaaggctgagcactgaagaattgatgcttttgaactgtggtgttggagaagactcttgagagtcccttggactgcaaggagatccaaccagtccattctgaagatcagccctgggatttctttggaaggaatgatgctaagctgaaactccagtactttggccacctcatgtgaagagttgactcattggaaaagactcatgctgggcgggattgggggcaggagcagaaggggatgacagaggatgagatggctggatggcatcactgactcaatggacatgagtttgagtaactccaggagttggtgatagacagggaggcctcagttcagttcagttcagttgctcagtcgtgtccaactctttgcgaccccatgaattgcagcactccctgtccatcaccaactcccggagttcactcagattcacttccattgagtcagtgatgccatccagccatctcatcctctgtcgtccccttctcgtcctgcccccaatccctcccagcaccagagtcttttccaataagtcaactcttcgcatgaggtggccaaagtactggagtttcagctttagcatcattccttccaaagaacacccaggactgatctcctttagaatggactggttggacctccttgcagtccaagggactctcaagagtcttctccaacaccacagttcaaaagcatcaattcttcggtgctcagccttcttcacagtccaactctcacatccatgcatgactactggaaaaaccatagccttgactagctggacctttgttggcaaagtaatgtctatgcttctgaatatgctatctaggttggtcataacttttcttccaaggagtaagcgtcttttaatttcatggctgcaatcaccatctgcactgattttggagccccaaaaaataaagtctgacactgtttccactgtttccccatctatttgccgtgaagtgatgggaccagatgccatgatctttcttataattcagtaacttataattcaatgtcattttaagtgagactagggattctttttgttagaaagcctggaacattacaataggcattctgaagcacaagttgtattaattctaattataccaacatgacaattaataataattgatgttgaagttagtgaagtatgcttacagtgatgtcttaaaagcgaattcaaatcaattaatggattatattcccaattttggggaaaaaaagaaaaccttaattttttctttgaactgcatcacgttccctctgaatcattgttttcgagctacatatcacaacatacatttggctaaacataaaaaaagggctgttatccaggttatcaacttcagtagtgagtttcaaattttcagaactttaacaaccaataaaagcatgttctctgaatgcagggcaactaactaagcctgtgcgccacaactactgagcctatgctctacagcctaggagccgcaatgctgagcccacgtgtcacagctactgaagccccaaagttccagagcctgtgctccgcaacaagagaagccacctcaggaaaaatcctgtgtacctcaactagcgggtaatcaacaaacacccagcagagccaaataatataattacatatatatatatatatatatataaactgctttgaagacgtctaggaaattatttgaagccaaattttacttcttggaaaacaggaatagaaaggatttagcccagtaaaaatagatgcatgcatgtttgtaagattttcaaactttcagaaaaaaaaaaagcttggaaatatgctgacatttggaaaatactcagctgacaactcccaggttagttttgtttgaaaacagaatactaacactaaacacataaatataggaaacagtgcattcaaaatcatggtcttttatttctctaacaagcttagcacaattactaaagaagcataagactgaatttcactcaattaaaacaaagttacagaatagctcccagattcacctccttcccttcctcttgggctaaaggtaaagaaagtgactttactgtcaacccatatcagttagtcaatttctcccatctttctttttccaaatacaccaatctgtttctgttattcctcataactcctagtatattattaatgaataatcagaatgtaagttaattaaaagacttattattaggaggacaacttttccagaatgattttaatttaacagactcctgagactccctggtaggccctaggaatcttcctttttcccattcatttagaagtgaatggaaataagtctttgcaatccactttatcagccccaggttcaactaaaaagttaaataacagtttacatcaaaacatgtccatacagttttttttcatgcattctctcttcaagatactctggcttcctcaaataaaaataattcaaaacaaatgtttactgtgtataattaaaatattttcagtaactattatacaaatccattggatttatgctttgcatttatagagagcaactaattacatttattatttttaagaaatcacagacctgttactccaagttgacaaacaactatcacagtcacttggaaaaagccaagccaattttttcagccactcagaacaatatttatgaagacaaagtatagagacttgtttcatgaacaattttgtgagtatacatgaaaaaagatgtattttcagtcatgaatattagttttaatttttgacaatttctagaatgttccatctttacataaaggaatgatactgtcaaatcggctatacaaagtttacttcaaaatcattacactttagtgttacactaataccagagactgatgagccaaatgccaaatagccccttaacactcactctgttgcttcctacagttgcaaacactaatggatctccttctttactgtgccagttaaactgaactccaaacaatggttgattatgatcttcctataaaccaagaaataagaaaaatcaatatattttaagaacaaaaaaggtagtaaactgatcattcccattaaaaaccttcccccctccacaaaatgcaagctgcaattttatgtatcatacataaactgacttttgacacttaaaagatatgttagtccagttttcacattttaaaatactggtgcatgataaaactatgtaacaattaaagacttagaggttaggtaacaagtactcatcaatgaaaatactttaatagttgctctctatcttcttaaacccaaatgccatgcttttgaatcaaaatataatggataattgtgacaaatgcatttaatctctcaggacacaatttatttttctgaaataacaaataacctgagttaatacagtttctccagtactcattaaacgttttctggttgaattcttcccttgtgaagtgaagaaaattgattccattcaaatcactgctctccattagttctatagaaacaatttaaaattactctgaatttggatcctaaaagaaaaaccacctaagaagttttataatgaacaagaacacttgaaagtgggggccagggaggcagtgggctgtaactccacagttaccaggaggttataaggaagtgtataaaaacaagcattcagttttttgtttttaattggagcagccctgattaacaatgttgtgtcagtttcaggtgcacagcaaagtgattcagccacacacacacatccattctttttcaaactcttttgccatctaggtcaccacagaattctgagcagagttccctctgctaaaagtattcagttttgttcataaagttatttttcagccttaggattttactggcaatttcctgatgtttaacagtaaccttcatattcactttaaggcactttaaagtctgacaacattcatttcttatcctttaaaaagccacagttttaggctttggaaatatttaataaaaataatacagttcaaaccactttccaaatatactacataaaaataggttaatatacctaaatattaacatgaaactacaaagggacactttgctttagaagaaaaacacacacacaagaacactgagattaatttctctccttttaagagagtataatttgacatacacagcaatgaattttgctacctagataggaaaataatttccatgtggaaataatttccaataatttccatagcttcttatgcttttcaaagactttaaaaggatatttagatatttttaaaagaatctaacatatgcacaagacactataaggtacattttggctcagtataggaaaaatatccccaaattaaaaaaacaggaaatgaatatataagacacttaaaataaatatcagtaaacattttttaaaaataaaaagactattgagaaagacagtaaataacgccaacctattatttctcccaaaaattaactatgcaaaacaaattataatttataccttttttcttgaaaacaattacaaataagagttcaatttttaaagactgacttccaactattataactttaaaatatttttaacttgacagagaaccttgagcataaaatgtttgccattgagaaacctgcaattctggaaccctgcattcagcccatagattgtgtctttctccacataccttgagactatttacacatttgaaagaatatttgcatttctttgacttccattttcccttcccccaactcttccttccaggtgcatttggcgtatttgtaggtgtatcagggcgttctgtgttggtaccgctttctatactgacagcatcatcctataagcagcaaatcagaaaaaactattatgaaacagcaatactgtactaaatcgaatcctgataagaataatactgcctttaaataataaggcactggtttgtgccagccatgacactacactgcctcacttcatctttactgctcttcatacaaggtatcgttagataagaaagtgttgcttagagagcctaaggtggtgtcttgctggttagggttgctgggattgaaaaccagggctgactcctaaatctgactgacctacatgtccttatagtttatttgactgcttgctgctcagtttggagcatggcagtgggtggctgtttgaggccagtgtgttagtacttcctatgttagatgaaaatcctgattatcactcaaactctactaatttataacacttaaaccatttagaaacttttttaggttctacatattacgtgctatttaccagtgaaatctgactcatggctctaaaatactcatgattcagagctccagaagctcactataaagtaaaatctttccaaatgcagaagtgactataaaccttaaaaattcacctaatttatatcctgtctccagtccacaagacatattaatggtcctctactctcagaagaggatttcactacctcttccaattacacattcctaagtgttctttggaataaagagatttatttaaacctgtatcaccttagggcagtagttactaaattcattccagaggaaccttttttcgtggagtgcccactaacatctacaagaatacagactagaaaccattgccctaggagctagttttaaattattgctttctaaagttagttttacgatattacagaaagttaaaaatccactagaatatcaaaaagtatattaaaaattcacattaatttgcttaaaaactgtatggtattatatggtagtttttaggggtggtttccaaaacttcaaatggttcataccaaaatgaaatgcttttaaaaagtacacaaattattctaacactacaatgggaaaaaagcaatggagtgggcagatggcacacagtagtgctcaatatctagactgtaacttaaacaaaaccagcttttagatcagaaaatataaaagttcagttcctaggtctaaatcactgctttttaatctctatttcttcctacctttcagttgaatttacacagttaaaatttagtgtagaaaacaattttgtgtttcacgggaaacttcatgtctactgcacacttttcttccatgttatcagattctagtctgcttcactgcctttgaacaatcttacatctcttacactgtggacagccaaagggagaggttcgaaatgtcttccctttcactctgaagaaaagtttttgtctccatttgcaacttcatctctacattcctttcatctgtatagtttgtactgtgtgacttaaattgaccagttcccttacatgagtaagatgtttctgaaaattatcttttaacactagagaaatgaaacaatacaatgcttagacatttattcaccagcttttttccactctggctaaaaattcaactgctaatcaagaagccacacaaaacagtaaataactggggaacattacacacacacaccttttacccatttaatttacccatctcctcaaatagtcaaatcaagacagaatcaaatggaaatgcaatacactcacaatgctttcattttaattgtaaattcaaacctttcctgagcatctagtatgtgcacaagctgatatccaccttgactcctcctcctcaaagtatagaatggtactgtgtaacagacatggcactaccaccttcatctgctcaacaaggaaatggggatagtaatttgtcccttgatcttgccacaggttccttaagcaaagtcaagtcttcagattcagacttctgatcttactaccaggcaacaatcagtattctttcagaagccaattatgctgcacttatatgaaaaagttaaaatggcaggtacatatacaatgaacttaaaataggtcggatattaactacacttactgtgctgatcattctgcaatgcaaatactgaattattatgttgtgcacctagaactaataacataatgttattggtcaattatatctaaactttaaaaaaagtttaacatcctaccagttctttgattcactttaacagtatcaactgctcagattaccataactccaacttacaaatagcacattctttcctccacttgcctttggccttcctgttattatttggctccctcaagagttaaaccactgcccttattagctttttctgaattcatttttatagagttctctactcccttcctttactgcttctcttatgtcctagatctcggtccctggatggaattcagagggcctgtgaacttatgcagttgaataaattcagaaataaatttaagattgcatcttaattttcacatttttaactgaaatctattacttccttctactataatacaggcagtatatgtgctaatgttactgtagctgtaacattctcagcaatggaaatcatgaatttttatattccattatagttgttgcagatctcaaaagctgtctctacccatcagtactatcagtcattgtgaggtctagttacttaatgtaataaagaagtactttatcaaacctgaagtttgttttaaacaattttataacttccttataattttatcattgattctgtttgtgatcatatatattgtattttatacatttgaaaatattactcagaagtttcacaggattcattaaagtgcccagggcagagaaaaggttaaaagtcgccatctaaaggaaggaaccaaaacaaaggcttagtccaaccatgtagctctgaacagcttcagtatgcatcaaagaatacattcttcttaagggtctgtaaaaagaaaataacttttcaatttatttagttccctgaaattttcctcagtctaaattgggtattgacatcttcattacatttctgactgataaatatctggaagggccagaaacgcaagtctagattacaaaataaggaataataattaaataacatttgcatggtatttatgaacgtggcattcataacaggttcagcactttacctgtatcatctcatttaatcctcacaaacatcccatgaggtaaatactgttattatccccatttttaagataagaatccaaggaaactaggtaaagtacctagatcaagcaaccggtaaagagtagagtggcaaattttaacctaacacctggatccagtttgtgctcctagtcactaatctaatctgccaagagaaatttaagagaacgtggaagtaaaacagattccaacggctggagtgaagagggtcaaaaatgttagatcccaatatataataagactggaaagcacaaacaggaaaataaaaagatttaaagtaacaccacctactaagcctttcagatatttcaagtccaaatcccacaaactgacaaccccccaaatatctttcctctatctgcaaaaagaattctttcccatctgttcagtgaaaattttggtcttgataccatgccatacatgtgcttcagtcggtgtgtaagatacaccatttattcttaaaactaggcaaactgagaaaaagaacttataccacccttctataacacttcagaaggcattccctcggaggattcacattttagagtatcacttttgaatgaaccgtcgagacatgttttcctgaacttattggatataaacttaaaaaaacatgaaacggcaaattaacgtcagttcggttatcactggcgtctcacctaaacacagtggggtcaactgttgggacggactagagttatgactatttttaaaaagtttaaaaaatctgatttcagagcacctttacgcatgcgagaccacgagcctacacctaaagccatctacctttaccacagttgcttagtgtcttctaggttgtccccgttatcctagcgaaaaccgactgaagactaactgtcccttctcattccttcctcaagagtcgctccccctccaactctggggacgactctcgcagttctcctcctccagaagtgaggccgactgtcaggcgcaccccttctccacagacgagacaggagcaaacacaaaagcccctttaagagagtcaccggaatccctgacgtccgagatctgctcttcccattgtggaccgcctggaagggtctaaggacacggtccctaaatcccctttttaaaagtccgtaacacacgctggcccctccttccaactgtcttaggaaaaaaacacctctaacttgccttttaaactactggaatctcagatccgcactttgcccccagaggcccaaactctcccactccacgcaaaacgctctcagggcagaccccctccgaccctccgccaccacgctctggccccaaccacattctccttcgcgaagtttcctttcgctctcggcgccccagctcaaaaaaaaccccctcagagacgagtttgattttctcctccacgcccgcgttttcctcagcagagcggtgacacctctccctccccccaccccaccttaccacagccgcccgcccgcccccgcgcccacagtttaaaaagaactgaaaactttgacggtcaagtcccgtccggactgccctggggggctgcgctcacattctcgtctccagagaggtccgggttgctattctcgtcgctgctcagcttctgcttcttggccgcaggcatgtctgttcccgccggcactgtcgacacttccctctcggacatattcctccgcctccctccaggttcctgccgccgggggcggggcctccgccacaccgccgtcaagcaagcccggccggagcttgccgcaaagctgccgccgccgccaccgccgccgctccccccactgtcgcaaaccgcgcccagccgccgaggcgggcgtgcgtgcgaccccgccacactgctgaaaaaggggcgcgcgcgcgcgcgccctcccgcgcggcttcccgggtccttccctgtccccgctcccgtcttgccctcttcccgccgccctcccggcagtttgcacggagcgggtgtgggatccgtcggcttccgagggcagttatttccaacgtcccccttccccgcgaccgccctgtaaagggagaggcggaactctgaagagggggtgccccctcacccccttcttccttccagagacggttcagccgcaattggcccaatccttcgatcccccgaccccgctgcgaggactcgaaagtctgtggaatggacgg
